United States Patent Application Publication US 2026/0357263 A1, published November 12, 2026 (application 19/690,178).

The application's sequence listing, which the Patent Office published only in electronic form, follows.

SEQUENCE LISTING (1396 sequences)

SEQ ID NO: 1 - RNA, 6431 nt, Homo sapiens
  source 1..6431: mol_type = mRNA
gtaagtcaacaatgtcctgggattgggacacactttctgggcactgctggccagtcccaaaatggaacataaggaagtggttcttctacttcttttatttctgaaatcagcagcacctgagcaaagccatgtggtccaggattgctaccatggtgatggacagagttatcgaggcacgtactccaccactgtcacaggaaggacctgccaagcttggtcatctatgacaccacatcaacataataggaccacagaaaactacccaaatgctggcttgatcatgaactactgcaggaatccagatgctgtggcagctccttattgttatacgagggatcccggtgtcaggtgggagtactgcaacctgacgcaatgctcagacgcagaagggactgccgtcgcgcctccgactgttaccccggttccaagcctagaggctccttccgaacaagcaccgactgagcaaaggcctggggtgcaggagtgctaccatggtaatggacagagttatcgaggcacatactccaccactgtcacaggaagaacctgccaagcttggtcatctatgacaccacactcgcatagtcggaccccagaatactacccaaatgctggcttgatcatgaactactgcaggaatccagatgctgtggcagctccttattgttatacgagggatcccggtgtcaggtgggagtactgcaacctgacgcaatgctcagacgcagaagggactgccgtcgcgcctccgactgttaccccggttccaagcctagaggctccttccgaacaagcaccgactgagcaaaggcctggggtgcaggagtgctaccatggtaatggacagagttatcgaggcacatactccaccactgtcacaggaagaacctgccaagcttggtcatctatgacaccacactcgcatagtcggaccccagaatactacccaaatgctggcttgatcatgaactactgcaggaatccagatgctgtggcagctccttattgttatacgagggatcccggtgtcaggtgggagtactgcaacctgacgcaatgctcagacgcagaagggactgccgtcgcgcctccgactgttaccccggttccaagcctagaggctccttccgaacaagcaccgactgagcagaggcctggggtgcaggagtgctaccacggtaatggacagagttatcgaggcacatactccaccactgtcactggaagaacctgccaagcttggtcatctatgacaccacactcgcatagtcggaccccagaatactacccaaatgctggcttgatcatgaactactgcaggaatccagatgctgtggcagctccttattgttatacgagggatcccggtgtcaggtgggagtactgcaacctgacgcaatgctcagacgcagaagggactgccgtcgcgcctccgactgttaccccggttccaagcctagaggctccttccgaacaagcaccgactgagcaaaggcctggggtgcaggagtgctaccatggtaatggacagagttatcgaggcacatactccaccactgtcacaggaagaacctgccaagcttggtcatctatgacaccacactcgcatagtcggaccccagaatactacccaaatgctggcttgatcatgaactactgcaggaatccagatgctgtggcagctccttattgttatacgagggatcccggtgtcaggtgggagtactgcaacctgacgcaatgctcagacgcagaagggactgccgtcgcgcctccgactgttaccccggttccaagcctagaggctccttccgaacaagcaccgactgagcaaaggcctggggtgcaggagtgctaccatggtaatggacagagttatcgaggcacatactccaccactgtcacaggaagaacctgccaagcttggtcatctatgacaccacactcgcatagtcggaccccagaatactacccaaatgctggcttgatcatgaactactgcaggaatccagatgctgtggcagctccttattgttatacgagggatcccggtgtcaggtgggagtactgcaacctgacgcaatgctcagacgcagaagggactgccgtcgcgcctccgactgttaccccggttccaagcctagaggctccttccgaacaagcaccgactgagcaaaggcctggggtgcaggagtgctaccatggtaatggacagagttatcgaggcacatactccaccactgtcacaggaagaacctgccaagcttggtcatctatgacaccacactcgcatagtcggaccccagaatactacccaaatgctggcttgatcatgaactactgcaggaatccagatgctgtggcagctccttattgttatacgagggatcccggtgtcaggtgggagtactgcaacctgacgcaatgctcagacgcagaagggactgccgtcgcgcctccgactgttaccccggttccaagcctagaggctccttccgaacaagcaccgactgagcagaggcctggggtgcaggagtgctaccacggtaatggacagagttatcgaggcacatactccaccactgtcactggaagaacctgccaagcttggtcatctatgacaccacactcgcatagtcggaccccagaatactacccaaatgctggcttgatcatgaactactgcaggaatccagatcctgtggcagccccttattgttatacgagggatcccagtgtcaggtgggagtactgcaacctgacacaatgctcagacgcagaagggactgccgtcgcgcctccaactattaccccgattccaagcctagaggctccttctgaacaagcaccaactgagcaaaggcctggggtgcaggagtgctaccacggaaatggacagagttatcaaggcacatacttcattactgtcacaggaagaacctgccaagcttggtcatctatgacaccacactcgcatagtcggaccccagcatactacccaaatgctggcttgatcaagaactactgccgaaatccagatcctgtggcagccccttggtgttatacaacagatcccagtgtcaggtgggagtactgcaacctgacacgatgctcagatgcagaatggactgccttcgtccctccgaatgttattctggctccaagcctagaggctttttttgaacaagcactgactgaggaaacccccggggtacaggactgctactaccattatggacagagttaccgaggcacatactccaccactgtcacaggaagaacttgccaagcttggtcatctatgacaccacaccagcatagtcggaccccagaaaactacccaaatgctggcctgaccaggaactactgcaggaatccagatgctgagattcgcccttggtgttacaccatggatcccagtgtcaggtgggagtactgcaacctgacacaatgcctggtgacagaatcaagtgtccttgcaactctcacggtggtcccagatccaagcacagaggcttcttctgaagaagcaccaacggagcaaagccccggggtccaggattgctaccatggtgatggacagagttatcgaggctcattctctaccactgtcacaggaaggacatgtcagtcttggtcctctatgacaccacactggcatcagaggacaacagaatattatccaaatggtggcctgaccaggaactactgcaggaatccagatgctgagattagtccttggtgttataccatggatcccaatgtcagatgggagtactgcaacctgacacaatgtccagtgacagaatcaagtgtccttgcgacgtccacggctgtttctgaacaagcaccaacggagcaaagccccacagtccaggactgctaccatggtgatggacagagttatcgaggctcattctccaccactgttacaggaaggacatgtcagtcttggtcctctatgacaccacactggcatcagagaaccacagaatactacccaaatggtggcctgaccaggaactactgcaggaatccagatgctgagattcgcccttggtgttataccatggatcccagtgtcagatgggagtactgcaacctgacgcaatgtccagtgatggaatcaactctcctcacaactcccacggtggtcccagttccaagcacagagcttccttctgaagaagcaccaactgaaaacagcactggggtccaggactgctaccgaggtgatggacagagttatcgaggcacactctccaccactatcacaggaagaacatgtcagtcttggtcgtctatgacaccacattggcatcggaggatcccattatactatccaaatgctggcctgaccaggaactactgcaggaatccagatgctgagattcgcccttggtgttacaccatggatcccagtgtcaggtgggagtactgcaacctgacacgatgtccagtgacagaatcgagtgtcctcacaactcccacagtggccccggttccaagcacagaggctccttctgaacaagcaccacctgagaaaagccctgtggtccaggattgctaccatggtgatggacggagttatcgaggcatatcctccaccactgtcacaggaaggacctgtcaatcttggtcatctatgataccacactggcatcagaggaccccagaaaactacccaaatgctggcctgaccgagaactactgcaggaatccagattctgggaaacaaccctggtgttacacaaccgatccgtgtgtgaggtgggagtactgcaatctgacacaatgctcagaaacagaatcaggtgtcctagagactcccactgttgttccagttccaagcatggaggctcattctgaagcagcaccaactgagcaaacccctgtggtccggcagtgctaccatggtaatggccagagttatcgaggcacattctccaccactgtcacaggaaggacatgtcaatcttggtcatccatgacaccacaccggcatcagaggaccccagaaaactacccaaatgatggcctgacaatgaactactgcaggaatccagatgccgatacaggcccttggtgttttaccatggaccccagcatcaggtgggagtactgcaacctgacgcgatgctcagacacagaagggactgtggtcgctcctccgactgtcatccaggttccaagcctagggcctccttctgaacaagactgtatgtttgggaatgggaaaggataccggggcaagaaggcaaccactgttactgggacgccatgccaggaatgggctgcccaggagccccatagacacagcacgttcattccagggacaaataaatgggcaggtctggaaaaaaattactgccgtaaccctgatggtgacatcaatggtccctggtgctacacaatgaatccaagaaaactttttgactactgtgatatccctctctgtgcatcctcttcatttgattgtgggaagcctcaagtggagccgaagaaatgtcctggaagcattgtaggggggtgtgtggcccacccacattcctggccctggcaagtcagtctcagaacaaggtttggaaagcacttctgtggaggcaccttaatatccccagagtgggtgctgactgctgctcactgcttgaagaagtcctcaaggccttcatcctacaaggtcatcctgggtgcacaccaagaagtgaacctcgaatctcatgttcaggaaatagaagtgtctaggctgttcttggagcccacacaagcagatattgccttgctaaagctaagcaggcctgccgtcatcactgacaaagtaatgccagcttgtctgccatccccagactacatggtcaccgccaggactgaatgttacatcactggctggggagaaacccaaggtacctttgggactggccttctcaaggaagcccagctccttgttattgagaatgaagtgtgcaatcactataagtatatttgtgctgagcatttggccagaggcactgacagttgccagggtgacagtggagggcctctggtttgcttcgagaaggacaaatacattttacaaggagtcacttcttggggtcttggctgtgcacgccccaataagcctggtgtctatgctcgtgtttcaaggtttgttacttggattgagggaatgatgagaaataattaattggacgggagacagagtgaagcatcaacctacttagaagctgaaacgtgggtaaggatttagcatgctggaaataatagacagcaatcaaacgaagacactgttcccagctaccagctatgccaaaccttggcatttttggtatttttgtgtataagcttttaaggtctgactgacaaattctgtattaaggtgtcatagctatgacatttgttaaaaataaactctgcacttattttgatttgaa

SEQ ID NO: 2 - RNA, 22 nt, synthetic construct
  source 1..22: mol_type = other RNA
ttcgataactctgtccatcacc

SEQ ID NO: 3 - RNA, 22 nt, synthetic construct
  source 1..22: mol_type = other RNA
tcatttgggtagttttctgtgg

SEQ ID NO: 4 - RNA, 22 nt, synthetic construct
  source 1..22: mol_type = other RNA
ttggtgtcatagatgaccaagc

SEQ ID NO: 5 - RNA, 22 nt, synthetic construct
  source 1..22: mol_type = other RNA
taagccagcatttgggtagtat

SEQ ID NO: 6 - RNA, 22 nt, synthetic construct
  source 1..22: mol_type = other RNA
tagactgacatgtccttcctgt

SEQ ID NO: 7 - RNA, 22 nt, synthetic construct
  source 1..22: mol_type = other RNA
tagttgcaaggacacttgattc

SEQ ID NO: 8 - RNA, 22 nt, synthetic construct
  source 1..22: mol_type = other RNA
tcgataactctgtccatcacca

SEQ ID NO: 9 - RNA, 22 nt, synthetic construct
  source 1..22: mol_type = other RNA
ttaactctgtccatcaccatgg

SEQ ID NO: 10 - RNA, 22 nt, synthetic construct
  source 1..22: mol_type = other RNA
ttgagcattgtgtcaggttgca

SEQ ID NO: 11 - RNA, 22 nt, synthetic construct
  source 1..22: mol_type = other RNA
tgataactctgtccatcaccat

SEQ ID NO: 12 - RNA, 22 nt, synthetic construct
  source 1..22: mol_type = other RNA
tataactctgtccattaccgtg

SEQ ID NO: 13 - RNA, 22 nt, synthetic construct
  source 1..22: mol_type = other RNA
ttcatagatgaccaagcttggc

SEQ ID NO: 14 - RNA, 22 nt, synthetic construct
  source 1..22: mol_type = other RNA
tataactctgtccatcaccatg

SEQ ID NO: 15 - RNA, 22 nt, synthetic construct
  source 1..22: mol_type = other RNA
ttgtcatagatgaccaagcttg

SEQ ID NO: 16 - RNA, 22 nt, synthetic construct
  source 1..22: mol_type = other RNA
taatgtgcctcgataactctgg

SEQ ID NO: 17 - RNA, 22 nt, synthetic construct
  source 1..22: mol_type = other RNA
tgagcattgtgtcaggttgcag

SEQ ID NO: 18 - RNA, 22 nt, synthetic construct
  source 1..22: mol_type = other RNA
tgatgaccaagcttggcaagtt

SEQ ID NO: 19 - RNA, 22 nt, synthetic construct
  source 1..22: mol_type = other RNA
taccaagcttggcaagttcttc

SEQ ID NO: 20 - RNA, 22 nt, synthetic construct
  source 1..22: mol_type = other RNA
tagtgtggtgtcatagatgacc

SEQ ID NO: 21 - RNA, 22 nt, synthetic construct
  source 1..22: mol_type = other RNA
tctctgtccatcaccatggtag

SEQ ID NO: 22 - RNA, 22 nt, synthetic construct
  source 1..22: mol_type = other RNA
tgtgcctcgataactctgtcca

SEQ ID NO: 23 - RNA, 20 nt, synthetic construct
  source 1..20: mol_type = other RNA
ttggtcatctatgacaccaa

SEQ ID NO: 24 - RNA, 20 nt, synthetic construct
  source 1..20: mol_type = other RNA
actacccaaatgctggctta

SEQ ID NO: 25 - RNA, 20 nt, synthetic construct
  source 1..20: mol_type = other RNA
aggaaggacatgtcagtcta

SEQ ID NO: 26 - RNA, 20 nt, synthetic construct
  source 1..20: mol_type = other RNA
atcaagtgtccttgcaacta

SEQ ID NO: 27 - RNA, 20 nt, synthetic construct
  source 1..20: mol_type = other RNA
gtgatggacagagttatcga

SEQ ID NO: 28 - RNA, 20 nt, synthetic construct
  source 1..20: mol_type = other RNA
atggtgatggacagagttaa

SEQ ID NO: 29 - RNA, 20 nt, synthetic construct
  source 1..20: mol_type = other RNA
caacctgacacaatgctcaa

SEQ ID NO: 30 - RNA, 20 nt, synthetic construct
  source 1..20: mol_type = other RNA
ggtgatggacagagttatca

SEQ ID NO: 31 - RNA, 20 nt, synthetic construct
  source 1..20: mol_type = other RNA
cggtaatggacagagttata

SEQ ID NO: 32 - RNA, 20 nt, synthetic construct
  source 1..20: mol_type = other RNA
caagcttggtcatctatgaa

SEQ ID NO: 33 - RNA, 20 nt, synthetic construct
  source 1..20: mol_type = other RNA
tggtgatggacagagttata

SEQ ID NO: 34 - RNA, 20 nt, synthetic construct
  source 1..20: mol_type = other RNA
agcttggtcatctatgacaa

SEQ ID NO: 35 - RNA, 20 nt, synthetic construct
  source 1..20: mol_type = other RNA
agagttatcgaggcacatta

SEQ ID NO: 36 - RNA, 20 nt, synthetic construct
  source 1..20: mol_type = other RNA
gcaacctgacacaatgctca

SEQ ID NO: 37 - RNA, 20 nt, synthetic construct
  source 1..20: mol_type = other RNA
cttgccaagcttggtcatca

SEQ ID NO: 38 - RNA, 20 nt, synthetic construct
  source 1..20: mol_type = other RNA
agaacttgccaagcttggta

SEQ ID NO: 39 - RNA, 20 nt, synthetic construct
  source 1..20: mol_type = other RNA
tcatctatgacaccacacta

SEQ ID NO: 40 - RNA, 20 nt, synthetic construct
  source 1..20: mol_type = other RNA
accatggtgatggacagaga

SEQ ID NO: 41 - RNA, 20 nt, synthetic construct
  source 1..20: mol_type = other RNA
gacagagttatcgaggcaca

SEQ ID NO: 42 - RNA, 22 nt, synthetic construct
  source 1..22: mol_type = other RNA
tgtggtgtcatagatgaccaag

SEQ ID NO: 43 - RNA, 22 nt, synthetic construct
  source 1..22: mol_type = other RNA
tagtggtggagaatgagcctcg

SEQ ID NO: 44 - RNA, 22 nt, synthetic construct
  source 1..22: mol_type = other RNA
tcctcgataactctgtccatca

SEQ ID NO: 45 - RNA, 22 nt, synthetic construct
  source 1..22: mol_type = other RNA
ttagatgaccaagcttggcagg

SEQ ID NO: 46 - RNA, 22 nt, synthetic construct
  source 1..22: mol_type = other RNA
tagcattgtgtcaggttgcagt

SEQ ID NO: 47 - RNA, 22 nt, synthetic construct
  source 1..22: mol_type = other RNA
tagaatgtgcctcgataactct

SEQ ID NO: 48 - RNA, 22 nt, synthetic construct
  source 1..22: mol_type = other RNA
tgtcatagatgaccaagcttgg

SEQ ID NO: 49 - RNA, 22 nt, synthetic construct
  source 1..22: mol_type = other RNA
taactctgtccatcaccatggt

SEQ ID NO: 50 - RNA, 22 nt, synthetic construct
  source 1..22: mol_type = other RNA
tgcctcgataactctgtccatc

SEQ ID NO: 51 - RNA, 22 nt, synthetic construct
  source 1..22: mol_type = other RNA
tagtagttcctggtcaggccag

SEQ ID NO: 52 - RNA, 22 nt, synthetic construct
  source 1..22: mol_type = other RNA
tcttttctcaggtggtgcttgt

SEQ ID NO: 53 - RNA, 22 nt, synthetic construct
  source 1..22: mol_type = other RNA
tgaatgtgcctcgataactctg

SEQ ID NO: 54 - RNA, 22 nt, synthetic construct
  source 1..22: mol_type = other RNA
tatgaccaagcttggcaggtcc

SEQ ID NO: 55 - RNA, 22 nt, synthetic construct
  source 1..22: mol_type = other RNA
ttgaccaagcttggcaagttct

SEQ ID NO: 56 - RNA, 22 nt, synthetic construct
  source 1..22: mol_type = other RNA
tgccacaggatctggatttcgg

SEQ ID NO: 57 - RNA, 22 nt, synthetic construct
  source 1..22: mol_type = other RNA
tctgagcattgtgtcaggttgc

SEQ ID NO: 58 - RNA, 22 nt, synthetic construct
  source 1..22: mol_type = other RNA
tactctgtccatcaccatggta

SEQ ID NO: 59 - RNA, 22 nt, synthetic construct
  source 1..22: mol_type = other RNA
tatgtgcctcgataactctggc

SEQ ID NO: 60 - RNA, 22 nt, synthetic construct
  source 1..22: mol_type = other RNA
ttagatgaccaagcttggcaag

SEQ ID NO: 61 - RNA, 22 nt, synthetic construct
  source 1..22: mol_type = other RNA
tgagttgcaaggacacttgatt

SEQ ID NO: 62 - RNA, 22 nt, synthetic construct
  source 1..22: mol_type = other RNA
tgagtgtggtgtcatagatgac

SEQ ID NO: 63 - RNA, 22 nt, synthetic construct
  source 1..22: mol_type = other RNA
ttgaccaagcttggcaggttct

SEQ ID NO: 64 - RNA, 22 nt, synthetic construct
  source 1..22: mol_type = other RNA
tgctcagtcggtgcttgttcgg

SEQ ID NO: 65 - RNA, 22 nt, synthetic construct
  source 1..22: mol_type = other RNA
tgagaatgagcctcgataactc

SEQ ID NO: 66 - RNA, 22 nt, synthetic construct
  source 1..22: mol_type = other RNA
tttgcaaggacacttgattctg

SEQ ID NO: 67 - RNA, 22 nt, synthetic construct
  source 1..22: mol_type = other RNA
ttgcagtactcccatctgacac

SEQ ID NO: 68 - RNA, 22 nt, synthetic construct
  source 1..22: mol_type = other RNA
tacagtggtggagaatgtgcct

SEQ ID NO: 69 - RNA, 22 nt, synthetic construct
  source 1..22: mol_type = other RNA
tatagatgaccaagcttggcag

SEQ ID NO: 70 - RNA, 22 nt, synthetic construct
  source 1..22: mol_type = other RNA
tattgtgtcaggttgcagtact

SEQ ID NO: 71 - RNA, 22 nt, synthetic construct
  source 1..22: mol_type = other RNA
tgtccatcaccatggtagcaat

SEQ ID NO: 72 - RNA, 22 nt, synthetic construct
  source 1..22: mol_type = other RNA
ttggtgtcatggatgaccaaga

SEQ ID NO: 73 - RNA, 22 nt, synthetic construct
  source 1..22: mol_type = other RNA
tatcaagccagcatttgggtag

SEQ ID NO: 74 - RNA, 22 nt, synthetic construct
  source 1..22: mol_type = other RNA
tcaccatggtagcaatcctgga

SEQ ID NO: 75 - RNA, 22 nt, synthetic construct
  source 1..22: mol_type = other RNA
tagtagttcctggtcaggccac

SEQ ID NO: 76 - RNA, 22 nt, synthetic construct
  source 1..22: mol_type = other RNA
tccaagcttggcaggtccttcc

SEQ ID NO: 77 - RNA, 22 nt, synthetic construct
  source 1..22: mol_type = other RNA
tagtcggtgcttgttcggaagg

SEQ ID NO: 78 - RNA, 22 nt, synthetic construct
  source 1..22: mol_type = other RNA
tcgtcaggttgcagtactccca

SEQ ID NO: 79 - RNA, 22 nt, synthetic construct
  source 1..22: mol_type = other RNA
tactgacatgtccttcctgtaa

SEQ ID NO: 80 - RNA, 22 nt, synthetic construct
  source 1..22: mol_type = other RNA
tttttctcaggtggtgcttgtt

SEQ ID NO: 81 - RNA, 22 nt, synthetic construct
  source 1..22: mol_type = other RNA
tctgcgtctgagcattgtgtca

SEQ ID NO: 82 - RNA, 22 nt, synthetic construct
  source 1..22: mol_type = other RNA
taagactgacatgtccttcctg

SEQ ID NO: 83 - RNA, 22 nt, synthetic construct
  source 1..22: mol_type = other RNA
taacaataaggggctgccacag

SEQ ID NO: 84 - RNA, 22 nt, synthetic construct
  source 1..22: mol_type = other RNA
taacaccaagggcgaatctcag

SEQ ID NO: 85 - RNA, 22 nt, synthetic construct
  source 1..22: mol_type = other RNA
ttgcagtactcccatctgacat

SEQ ID NO: 86 - RNA, 22 nt, synthetic construct
  source 1..22: mol_type = other RNA
tctgcagtagttcctggtcagg

SEQ ID NO: 87 - RNA, 22 nt, synthetic construct
  source 1..22: mol_type = other RNA
ttcagttggtgcttcttcagaa

SEQ ID NO: 88 - RNA, 22 nt, synthetic construct
  source 1..22: mol_type = other RNA
tgtactcccacctgacactggg

SEQ ID NO: 89 - RNA, 22 nt, synthetic construct
  source 1..22: mol_type = other RNA
taggttgcagtactcccatctg

SEQ ID NO: 90 - RNA, 22 nt, synthetic construct
  source 1..22: mol_type = other RNA
tctcgataactctgtccatcac

SEQ ID NO: 91 - RNA, 22 nt, synthetic construct
  source 1..22: mol_type = other RNA
tcaagactgacatgtccttcct

SEQ ID NO: 92 - RNA, 22 nt, synthetic construct
  source 1..22: mol_type = other RNA
tacttgattctgtcactggaca

SEQ ID NO: 93 - RNA, 22 nt, synthetic construct
  source 1..22: mol_type = other RNA
taatattctgttgtcctctgat

SEQ ID NO: 94 - RNA, 22 nt, synthetic construct
  source 1..22: mol_type = other RNA
tgtataacaataaggggctgcc

SEQ ID NO: 95 - RNA, 22 nt, synthetic construct
  source 1..22: mol_type = other RNA
ttcaggccaccatttgggtagt

SEQ ID NO: 96 - RNA, 22 nt, synthetic construct
  source 1..22: mol_type = other RNA
tataatattctgttgtcctctg

SEQ ID NO: 97 - RNA, 22 nt, synthetic construct
  source 1..22: mol_type = other RNA
tatgagcctcgataactctgtc

SEQ ID NO: 98 - RNA, 22 nt, synthetic construct
  source 1..22: mol_type = other RNA
tctctaggcttggaaccggggt

SEQ ID NO: 99 - RNA, 22 nt, synthetic construct
  source 1..22: mol_type = other RNA
tgataatattctgttgtcctct

SEQ ID NO: 100 - RNA, 22 nt, synthetic construct
  source 1..22: mol_type = other RNA
ttgcagtactcccacctgacac

SEQ ID NO: 101 - RNA, 22 nt, synthetic construct
  source 1..22: mol_type = other RNA
tacatgtccttcctgtgacagt

SEQ ID NO: 102 - RNA, 22 nt, synthetic construct
  source 1..22: mol_type = other RNA
tcaataaggggctgccacagga

SEQ ID NO: 103 - RNA, 22 nt, synthetic construct
  source 1..22: mol_type = other RNA
ttgtggtgtcatagaggaccaa

SEQ ID NO: 104 - RNA, 22 nt, synthetic construct
  source 1..22: mol_type = other RNA
tccgttggtgcttcttcagaag

SEQ ID NO: 105 - RNA, 22 nt, synthetic construct
  source 1..22: mol_type = other RNA
taccaagactgacatgtccttc

SEQ ID NO: 106 - RNA, 22 nt, synthetic construct
  source 1..22: mol_type = other RNA
tagaatgagcctcgataactct

SEQ ID NO: 107 - RNA, 22 nt, synthetic construct
  source 1..22: mol_type = other RNA
tcttggcaggttcttcctgtga

SEQ ID NO: 108 - RNA, 22 nt, synthetic construct
  source 1..22: mol_type = other RNA
ttgctccgttggtgcttcttca

SEQ ID NO: 109 - RNA, 22 nt, synthetic construct
  source 1..22: mol_type = other RNA
tattctgttgtcctctgatgcc

SEQ ID NO: 110 - RNA, 22 nt, synthetic construct
  source 1..22: mol_type = other RNA
taagcttggcaagttcttcctg

SEQ ID NO: 111 - RNA, 22 nt, synthetic construct
  source 1..22: mol_type = other RNA
tctgtccatcaccatggtagca

SEQ ID NO: 112 - RNA, 22 nt, synthetic construct
  source 1..22: mol_type = other RNA
tccaagactgacatgtccttcc

SEQ ID NO: 113 - RNA, 22 nt, synthetic construct
  source 1..22: mol_type = other RNA
tcaagcttggcaagttcttcct

SEQ ID NO: 114 - RNA, 22 nt, synthetic construct
  source 1..22: mol_type = other RNA
tgaggaccaagactgacatgtc

SEQ ID NO: 115 - RNA, 22 nt, synthetic construct
  source 1..22: mol_type = other RNA
tagatgaccaagcttggcaagt

SEQ ID NO: 116 - RNA, 22 nt, synthetic construct
  source 1..22: mol_type = other RNA
taggttgcagtactcccacctg

SEQ ID NO: 117 - RNA, 22 nt, synthetic construct
  source 1..22: mol_type = other RNA
tcatagaggaccaagactgaca

SEQ ID NO: 118 - RNA, 22 nt, synthetic construct
  source 1..22: mol_type = other RNA
tgagaatgtgcctcgataactc

SEQ ID NO: 119 - RNA, 22 nt, synthetic construct
  source 1..22: mol_type = other RNA
tattgacatgtccttcctgtga

SEQ ID NO: 120 - RNA, 22 nt, synthetic construct
  source 1..22: mol_type = other RNA
tatattctgttgtcctctgatg

SEQ ID NO: 121 - RNA, 22 nt, synthetic construct
  source 1..22: mol_type = other RNA
tgccaccatttgggtagtattc

SEQ ID NO: 122 - RNA, 22 nt, synthetic construct
  source 1..22: mol_type = other RNA
tgtagttttctggggtccgact

SEQ ID NO: 123 - RNA, 22 nt, synthetic construct
  source 1..22: mol_type = other RNA
tcactggacattgtgtcaggtt

SEQ ID NO: 124 - RNA, 22 nt, synthetic construct
  source 1..22: mol_type = other RNA
tccagtgtggtgtcatagagga

SEQ ID NO: 125 - RNA, 22 nt, synthetic construct
  source 1..22: mol_type = other RNA
tggacacttgattctgtcacca

SEQ ID NO: 126 - RNA, 22 nt, synthetic construct
  source 1..22: mol_type = other RNA
tgttgcaaggacacttgattct

SEQ ID NO: 127 - RNA, 22 nt, synthetic construct
  source 1..22: mol_type = other RNA
tgcaatcctggaccacatggct

SEQ ID NO: 128 - RNA, 22 nt, synthetic construct
  source 1..22: mol_type = other RNA
tcaagcttggcaggttcttcct

SEQ ID NO: 129 - RNA, 22 nt, synthetic construct
  source 1..22: mol_type = other RNA
tgatccatggtgtaacaccaag

SEQ ID NO: 130 - RNA, 22 nt, synthetic construct
  source 1..22: mol_type = other RNA
ttaatattctgttgtcctctga

SEQ ID NO: 131 - RNA, 22 nt, synthetic construct
  source 1..22: mol_type = other RNA
ttaacaccaaggggctgccaca

SEQ ID NO: 132 - RNA, 22 nt, synthetic construct
  source 1..22: mol_type = other RNA
tccatcaccatggtagcaatcc

SEQ ID NO: 133 - RNA, 22 nt, synthetic construct
  source 1..22: mol_type = other RNA
tctcagcatctggattcctgca

SEQ ID NO: 134 - RNA, 22 nt, synthetic construct
  source 1..22: mol_type = other RNA
tcacaggatctggattcctgca

SEQ ID NO: 135 - RNA, 22 nt, synthetic construct
  source 1..22: mol_type = other RNA
tggcaggtccttcctgtgacag

SEQ ID NO: 136 - RNA, 22 nt, synthetic construct
  source 1..22: mol_type = other RNA
tgactgacatgtccttcctgta

SEQ ID NO: 137 - RNA, 22 nt, synthetic construct
  source 1..22: mol_type = other RNA
tattcctgcagtagttcctggt

SEQ ID NO: 138 - RNA, 22 nt, synthetic construct
  source 1..22: mol_type = other RNA
tcattgtgtcaggttgcagtac

SEQ ID NO: 139 - RNA, 22 nt, synthetic construct
  source 1..22: mol_type = other RNA
tcaagccagcatttgggtagta

SEQ ID NO: 140 - RNA, 22 nt, synthetic construct
  source 1..22: mol_type = other RNA
tgacactgggatccatggtgta

SEQ ID NO: 141 - RNA, 22 nt, synthetic construct
  source 1..22: mol_type = other RNA
tgaccaagcttggcaagttctt

SEQ ID NO: 142 - RNA, 22 nt, synthetic construct
  source 1..22: mol_type = other RNA
ttctgagcattgtgtcaggttg

SEQ ID NO: 143 - RNA, 22 nt, synthetic construct
  source 1..22: mol_type = other RNA
tgcattgtgtcaggttgcagta

SEQ ID NO: 144 - RNA, 22 nt, synthetic construct
  source 1..22: mol_type = other RNA
tttgctcagttggtgcttgttc

SEQ ID NO: 145 - RNA, 22 nt, synthetic construct
  source 1..22: mol_type = other RNA
tcatggtataacaccaagggcg

SEQ ID NO: 146 - RNA, 22 nt, synthetic construct
  source 1..22: mol_type = other RNA
taactctgtccataatggtagt

SEQ ID NO: 147 - RNA, 22 nt, synthetic construct
  source 1..22: mol_type = other RNA
tcaggatctggatttcggcagt

SEQ ID NO: 148 - RNA, 22 nt, synthetic construct
  source 1..22: mol_type = other RNA
tgaatctcagcatctggattcc

SEQ ID NO: 149 - RNA, 22 nt, synthetic construct
  source 1..22: mol_type = other RNA
ttggtggagaatgtgcctcgat

SEQ ID NO: 150 - RNA, 22 nt, synthetic construct
  source 1..22: mol_type = other RNA
ttcaggccagcatttgggtagt

SEQ ID NO: 151 - RNA, 22 nt, synthetic construct
  source 1..22: mol_type = other RNA
tgcatctggattcctgcagtag

SEQ ID NO: 152 - RNA, 22 nt, synthetic construct
  source 1..22: mol_type = other RNA
ttgcctcgataactctgtccat

SEQ ID NO: 153 - RNA, 22 nt, synthetic construct
  source 1..22: mol_type = other RNA
tagtcccttctgcgtctgagca

SEQ ID NO: 154 - RNA, 22 nt, synthetic construct
  source 1..22: mol_type = other RNA
tggatttcggcagtagttcttg

SEQ ID NO: 155 - RNA, 22 nt, synthetic construct
  source 1..22: mol_type = other RNA
tgtgtcatagatgaccaagctt

SEQ ID NO: 156 - RNA, 22 nt, synthetic construct
  source 1..22: mol_type = other RNA
tctgacatgttcttcctgtgat

SEQ ID NO: 157 - RNA, 22 nt, synthetic construct
  source 1..22: mol_type = other RNA
tctggtcaggccagcatttggg

SEQ ID NO: 158 - RNA, 22 nt, synthetic construct
  source 1..22: mol_type = other RNA
tgttttcagttggtgcttcttc

SEQ ID NO: 159 - RNA, 22 nt, synthetic construct
  source 1..22: mol_type = other RNA
tctctgatgccagtgtggtgtc

SEQ ID NO: 160 - RNA, 22 nt, synthetic construct
  source 1..22: mol_type = other RNA
tatcaccatggtagcaatcctg

SEQ ID NO: 161 - RNA, 22 nt, synthetic construct
  source 1..22: mol_type = other RNA
tgtggagaatgagcctcgataa

SEQ ID NO: 162 - RNA, 22 nt, synthetic construct
  source 1..22: mol_type = other RNA
tttctgttgtcctctgatgcca

SEQ ID NO: 163 - RNA, 22 nt, synthetic construct
  source 1..22: mol_type = other RNA
tctgtcactggacattgtgtca

SEQ ID NO: 164 - RNA, 22 nt, synthetic construct
  source 1..22: mol_type = other RNA
ttgcttgttcagaaggagcctc

SEQ ID NO: 165 - RNA, 22 nt, synthetic construct
  source 1..22: mol_type = other RNA
tctttgctcagtcggtgcttgt

SEQ ID NO: 166 - RNA, 22 nt, synthetic construct
  source 1..22: mol_type = other RNA
tctgttgtcctctgatgccagt

SEQ ID NO: 167 - RNA, 22 nt, synthetic construct
  source 1..22: mol_type = other RNA
tccaagcttggcaagttcttcc

SEQ ID NO: 168 - RNA, 22 nt, synthetic construct
  source 1..22: mol_type = other RNA
tatggtagcaatcctggacccc

SEQ ID NO: 169 - RNA, 22 nt, synthetic construct
  source 1..22: mol_type = other RNA
tgtataacaccaagggcgaatc

SEQ ID NO: 170 - RNA, 22 nt, synthetic construct
  source 1..22: mol_type = other RNA
tgacactgggatccatggtata

SEQ ID NO: 171 - RNA, 22 nt, synthetic construct
  source 1..22: mol_type = other RNA
tcttcctgtgacagtggtggag

SEQ ID NO: 172 - RNA, 22 nt, synthetic construct
  source 1..22: mol_type = other RNA
ttcccacctgacactgggatcc

SEQ ID NO: 173 - RNA, 22 nt, synthetic construct
  source 1..22: mol_type = other RNA
tgcatttgggtagttttctggg

SEQ ID NO: 174 - RNA, 22 nt, synthetic construct
  source 1..22: mol_type = other RNA
tgatcaagccagcatttgggta

SEQ ID NO: 175 - RNA, 22 nt, synthetic construct
  source 1..22: mol_type = other RNA
tgtagcactcctgcaccccagg

SEQ ID NO: 176 - RNA, 22 nt, synthetic construct
  source 1..22: mol_type = other RNA
tttgggtagttttctggggtcc

SEQ ID NO: 177 - RNA, 22 nt, synthetic construct
  source 1..22: mol_type = other RNA
tgtctgagcattgtgtcaggtt

SEQ ID NO: 178 - RNA, 22 nt, synthetic construct
  source 1..22: mol_type = other RNA
tgatccatggtataacaccaag

SEQ ID NO: 179 - RNA, 22 nt, synthetic construct
  source 1..22: mol_type = other RNA
tacctgacactgggatccatgg

SEQ ID NO: 180 - RNA, 22 nt, synthetic construct
  source 1..22: mol_type = other RNA
tgtgcttcttcagaagaagcct

SEQ ID NO: 181 - RNA, 22 nt, synthetic construct
  source 1..22: mol_type = other RNA
tttttctggggtccgactatgc

SEQ ID NO: 182 - RNA, 22 nt, synthetic construct
  source 1..22: mol_type = other RNA
tgacattgggatccatggtata

SEQ ID NO: 183 - RNA, 22 nt, synthetic construct
  source 1..22: mol_type = other RNA
ttattctgttgtcctctgatgc

SEQ ID NO: 184 - RNA, 22 nt, synthetic construct
  source 1..22: mol_type = other RNA
tgaccaccgtgggagttgtgag

SEQ ID NO: 185 - RNA, 22 nt, synthetic construct
  source 1..22: mol_type = other RNA
tcttgttcggaaggagcctcta

SEQ ID NO: 186 - RNA, 22 nt, synthetic construct
  source 1..22: mol_type = other RNA
tggacattgtgtcaggttgcag

SEQ ID NO: 187 - RNA, 22 nt, synthetic construct
  source 1..22: mol_type = other RNA
tataaggggctgccacaggatc

SEQ ID NO: 188 - RNA, 22 nt, synthetic construct
  source 1..22: mol_type = other RNA
tgcttggcaggtccttcctgtg

SEQ ID NO: 189 - RNA, 22 nt, synthetic construct
  source 1..22: mol_type = other RNA
tctgccacaggatctggattcc

SEQ ID NO: 190 - RNA, 22 nt, synthetic construct
  source 1..22: mol_type = other RNA
ttcaagccagcatttgggtagt

SEQ ID NO: 191 - RNA, 22 nt, synthetic construct
  source 1..22: mol_type = other RNA
ttgccttgataactctgtccat

SEQ ID NO: 192 - RNA, 22 nt, synthetic construct
  source 1..22: mol_type = other RNA
tccccaggcctttgctcagtcg

SEQ ID NO: 193 - RNA, 22 nt, synthetic construct
  source 1..22: mol_type = other RNA
tcgactatgctggtgtggtgtc

SEQ ID NO: 194 - RNA, 22 nt, synthetic construct
  source 1..22: mol_type = other RNA
tgggcgaatctcagcatctgga

SEQ ID NO: 195 - RNA, 22 nt, synthetic construct
  source 1..22: mol_type = other RNA
tgcctttgctcagttggtgctt

SEQ ID NO: 196 - RNA, 22 nt, synthetic construct
  source 1..22: mol_type = other RNA
ttatgctggtgtggtgtcatag

SEQ ID NO: 197 - RNA, 22 nt, synthetic construct
  source 1..22: mol_type = other RNA
tttttcagttggtgcttcttca

SEQ ID NO: 198 - RNA, 22 nt, synthetic construct
  source 1..22: mol_type = other RNA
tgagcctctaggcttggaaccg

SEQ ID NO: 199 - RNA, 22 nt, synthetic construct
  source 1..22: mol_type = other RNA
tctgagcatcgcgtcaggttgc

SEQ ID NO: 200 - RNA, 22 nt, synthetic construct
  source 1..22: mol_type = other RNA
tatgaccaagcttggcaagttc

SEQ ID NO: 201 - RNA, 22 nt, synthetic construct
  source 1..22: mol_type = other RNA
ttgtcctctgatgccagtgtgg

SEQ ID NO: 202 - RNA, 22 nt, synthetic construct
  source 1..22: mol_type = other RNA
tgttcctggtcaggccagcatt

SEQ ID NO: 203 - RNA, 22 nt, synthetic construct
  source 1..22: mol_type = other RNA
tctgggatccatggtataacac

SEQ ID NO: 204 - RNA, 22 nt, synthetic construct
  source 1..22: mol_type = other RNA
tccaggcctttgctcagttggt

SEQ ID NO: 205 - RNA, 22 nt, synthetic construct
  source 1..22: mol_type = other RNA
tgttgcagtactcccacctgat

SEQ ID NO: 206 - RNA, 22 nt, synthetic construct
  source 1..22: mol_type = other RNA
tggagaatgtgcctcgataact

SEQ ID NO: 207 - RNA, 22 nt, synthetic construct
  source 1..22: mol_type = other RNA
tctggaccccggggctttgctc

SEQ ID NO: 208 - RNA, 22 nt, synthetic construct
  source 1..22: mol_type = other RNA
tcacatggctttgctcaggtgc

SEQ ID NO: 209 - RNA, 22 nt, synthetic construct
  source 1..22: mol_type = other RNA
tctgcatctgagcatcgtgtca

SEQ ID NO: 210 - RNA, 22 nt, synthetic construct
  source 1..22: mol_type = other RNA
ttgaccaagattgacatgtcct

SEQ ID NO: 211 - RNA, 22 nt, synthetic construct
  source 1..22: mol_type = other RNA
tggggctgccacaggatctgga

SEQ ID NO: 212 - RNA, 22 nt, synthetic construct
  source 1..22: mol_type = other RNA
taccgtgggagttgtgaggaga

SEQ ID NO: 213 - RNA, 22 nt, synthetic construct
  source 1..22: mol_type = other RNA
tcagaaggagcctctaggcttg

SEQ ID NO: 214 - RNA, 22 nt, synthetic construct
  source 1..22: mol_type = other RNA
ttcctgcagtagttcattgtca

SEQ ID NO: 215 - RNA, 22 nt, synthetic construct
  source 1..22: mol_type = other RNA
tggacacttgattctgtcactg

SEQ ID NO: 216 - RNA, 22 nt, synthetic construct
  source 1..22: mol_type = other RNA
tggtccttcctgtgacagtggt

SEQ ID NO: 217 - RNA, 22 nt, synthetic construct
  source 1..22: mol_type = other RNA
tgtgtcatagaggaccaagact

SEQ ID NO: 218 - RNA, 22 nt, synthetic construct
  source 1..22: mol_type = other RNA
tccttctgcgtctgagcattgt

SEQ ID NO: 219 - RNA, 22 nt, synthetic construct
  source 1..22: mol_type = other RNA
tggattcctgcagtagttcatt

SEQ ID NO: 220 - RNA, 22 nt, synthetic construct
  source 1..22: mol_type = other RNA
tggtagcaatcctggaccacat

SEQ ID NO: 221 - RNA, 22 nt, synthetic construct
  source 1..22: mol_type = other RNA
ttggtagcactcctgcacccca

SEQ ID NO: 222 - RNA, 22 nt, synthetic construct
  source 1..22: mol_type = other RNA
tctggtgtggtgtcatagatga

SEQ ID NO: 223 - RNA, 22 nt, synthetic construct
  source 1..22: mol_type = other RNA
tgtctctaggacacctgattct

SEQ ID NO: 224 - RNA, 22 nt, synthetic construct
  source 1..22: mol_type = other RNA
tccatggtagcaatcctggacc

SEQ ID NO: 225 - RNA, 22 nt, synthetic construct
  source 1..22: mol_type = other RNA
tgaccacatggctttgctcagg

SEQ ID NO: 226 - RNA, 22 nt, synthetic construct
  source 1..22: mol_type = other RNA
tatctggatttcggcagtagtt

SEQ ID NO: 227 - RNA, 22 nt, synthetic construct
  source 1..22: mol_type = other RNA
tcaccccaggcctttgctcagt

SEQ ID NO: 228 - RNA, 22 nt, synthetic construct
  source 1..22: mol_type = other RNA
ttgcaccccaggcctttgctca

SEQ ID NO: 229 - RNA, 22 nt, synthetic construct
  source 1..22: mol_type = other RNA
ttggatgaccaagattgacatg

SEQ ID NO: 230 - RNA, 22 nt, synthetic construct
  source 1..22: mol_type = other RNA
tctgttttcagttggtgcttct

SEQ ID NO: 231 - RNA, 22 nt, synthetic construct
  source 1..22: mol_type = other RNA
tctgtaccccgggggtttcctc

SEQ ID NO: 232 - RNA, 22 nt, synthetic construct
  source 1..22: mol_type = other RNA
tgggtagttttctggggtcctc

SEQ ID NO: 233 - RNA, 22 nt, synthetic construct
  source 1..22: mol_type = other RNA
tggtgtggtgtcatggatgacc

SEQ ID NO: 234 - RNA, 22 nt, synthetic construct
  source 1..22: mol_type = other RNA
ttgtaccccgggggtttcctca

SEQ ID NO: 235 - RNA, 22 nt, synthetic construct
  source 1..22: mol_type = other RNA
tccaagggcgaatctcagcatc

SEQ ID NO: 236 - RNA, 22 nt, synthetic construct
  source 1..22: mol_type = other RNA
ttgtggtgtcatagatgaccaa

SEQ ID NO: 237 - RNA, 22 nt, synthetic construct
  source 1..22: mol_type = other RNA
tttgggatccatggtataacac

SEQ ID NO: 238 - RNA, 22 nt, synthetic construct
  source 1..22: mol_type = other RNA
taggcctttgctcagtcggtgc

SEQ ID NO: 239 - RNA, 22 nt, synthetic construct
  source 1..22: mol_type = other RNA
tggatctggattcctgcagtag

SEQ ID NO: 240 - RNA, 22 nt, synthetic construct
  source 1..22: mol_type = other RNA
tctgggatccatggtgtaacac

SEQ ID NO: 241 - RNA, 22 nt, synthetic construct
  source 1..22: mol_type = other RNA
tttggtgcttcttcagaaggaa

SEQ ID NO: 242 - RNA, 22 nt, synthetic construct
  source 1..22: mol_type = other RNA
tctgtccataatggtagtagca

SEQ ID NO: 243 - RNA, 22 nt, synthetic construct
  source 1..22: mol_type = other RNA
tcatagatgaccaagcttggca

SEQ ID NO: 244 - RNA, 22 nt, synthetic construct
  source 1..22: mol_type = other RNA
tggggtccatggtaaaacacca

SEQ ID NO: 245 - RNA, 22 nt, synthetic construct
  source 1..22: mol_type = other RNA
tctcctgcaccccaggcctttg

SEQ ID NO: 246 - RNA, 22 nt, synthetic construct
  source 1..22: mol_type = other RNA
tgcttggaactgggaccaccgt

SEQ ID NO: 247 - RNA, 22 nt, synthetic construct
  source 1..22: mol_type = other RNA
tagcactcctgcaccccaggcc

SEQ ID NO: 248 - RNA, 22 nt, synthetic construct
  source 1..22: mol_type = other RNA
tagttttctggggtcctctgat

SEQ ID NO: 249 - RNA, 22 nt, synthetic construct
  source 1..22: mol_type = other RNA
ttcccttctgtgtctgagcatc

SEQ ID NO: 250 - RNA, 22 nt, synthetic construct
  source 1..22: mol_type = other RNA
tcatggtgtaacaccaagggcg

SEQ ID NO: 251 - RNA, 22 nt, synthetic construct
  source 1..22: mol_type = other RNA
tgtgtaacaccaagggcgaatc

SEQ ID NO: 252 - RNA, 22 nt, synthetic construct
  source 1..22: mol_type = other RNA
tggaccacatggctttgctcag

SEQ ID NO: 253 - RNA, 22 nt, synthetic construct
  source 1..22: mol_type = other RNA
tgtccttcctgtgacagtggtg

SEQ ID NO: 254 - RNA, 22 nt, synthetic construct
  source 1..22: mol_type = other RNA
tgttcctggtcaggccaccatt

SEQ ID NO: 255 - RNA, 22 nt, synthetic construct
  source 1..22: mol_type = other RNA
tatagatgaccaagcttggcaa

SEQ ID NO: 256 - RNA, 22 nt, synthetic construct
  source 1..22: mol_type = other RNA
tcgtggtagcactcctgcaccc

SEQ ID NO: 257 - RNA, 22 nt, synthetic construct
  source 1..22: mol_type = other RNA
tttcggaaggagcctctaggct

SEQ ID NO: 258 - RNA, 22 nt, synthetic construct
  source 1..22: mol_type = other RNA
tcacagggcttttctcaggtgg

SEQ ID NO: 259 - RNA, 22 nt, synthetic construct
  source 1..22: mol_type = other RNA
ttataacaccaaggggctgcca

SEQ ID NO: 260 - RNA, 22 nt, synthetic construct
  source 1..22: mol_type = other RNA
tatttgggtagttttctggggt

SEQ ID NO: 261 - RNA, 22 nt, synthetic construct
  source 1..22: mol_type = other RNA
tggtgcttgttcggaaggagcc

SEQ ID NO: 262 - RNA, 22 nt, synthetic construct
  source 1..22: mol_type = other RNA
tctctaggacacctgattctgt

SEQ ID NO: 263 - RNA, 22 nt, synthetic construct
  source 1..22: mol_type = other RNA
tgccagcatttgggtagttttc

SEQ ID NO: 264 - RNA, 22 nt, synthetic construct
  source 1..22: mol_type = other RNA
tatctggattcctgcagtagtt

SEQ ID NO: 265 - RNA, 22 nt, synthetic construct
  source 1..22: mol_type = other RNA
tgaaggagcctctaggcttgga

SEQ ID NO: 266 - RNA, 22 nt, synthetic construct
  source 1..22: mol_type = other RNA
tcaagattgacatgtccttcct

SEQ ID NO: 267 - RNA, 22 nt, synthetic construct
  source 1..22: mol_type = other RNA
tttcctgtgacagtggtggaga

SEQ ID NO: 268 - RNA, 22 nt, synthetic construct
  source 1..22: mol_type = other RNA
tgtcatggatgaccaagattga

SEQ ID NO: 269 - RNA, 22 nt, synthetic construct
  source 1..22: mol_type = other RNA
tcaatgcttccaggacatttct

SEQ ID NO: 270 - RNA, 22 nt, synthetic construct
  source 1..22: mol_type = other RNA
tggtccgactatgctggtgtgg

SEQ ID NO: 271 - RNA, 22 nt, synthetic construct
  source 1..22: mol_type = other RNA
tctacaatgcttccaggacatt

SEQ ID NO: 272 - RNA, 22 nt, synthetic construct
  source 1..22: mol_type = other RNA
tgatgccagtgtggtgtcatag

SEQ ID NO: 273 - RNA, 22 nt, synthetic construct
  source 1..22: mol_type = other RNA
ttccatggtaaaacaccaaggg

SEQ ID NO: 274 - RNA, 22 nt, synthetic construct
  source 1..22: mol_type = other RNA
tttctgcatctgagcatcgtgt

SEQ ID NO: 275 - RNA, 22 nt, synthetic construct
  source 1..22: mol_type = other RNA
tatcctggaccacatggctttg

SEQ ID NO: 276 - RNA, 22 nt, synthetic construct
  source 1..22: mol_type = other RNA
tcgcgtcaggttgcagtactcc

SEQ ID NO: 277 - RNA, 22 nt, synthetic construct
  source 1..22: mol_type = other RNA
tctggattcctgcagtagttcc

SEQ ID NO: 278 - RNA, 22 nt, synthetic construct
  source 1..22: mol_type = other RNA
tgcatcgcgtcaggttgcagta

SEQ ID NO: 279 - RNA, 22 nt, synthetic construct
  source 1..22: mol_type = other RNA
tttctggggtcctctgatgccg

SEQ ID NO: 280 - RNA, 22 nt, synthetic construct
  source 1..22: mol_type = other RNA
tgacacctgattctgtttctga

SEQ ID NO: 281 - RNA, 22 nt, synthetic construct
  source 1..22: mol_type = other RNA
tacagtcccttctgtgtctgag

SEQ ID NO: 282 - RNA, 22 nt, synthetic construct
  source 1..22: mol_type = other RNA
ttgttcagaaggagcctctagg

SEQ ID NO: 283 - RNA, 22 nt, synthetic construct
  source 1..22: mol_type = other RNA
tcactcctgcaccccaggcctt

SEQ ID NO: 284 - RNA, 22 nt, synthetic construct
  source 1..22: mol_type = other RNA
tatagatgaccaagattgacag

SEQ ID NO: 285 - RNA, 22 nt, synthetic construct
  source 1..22: mol_type = other RNA
ttgtgacagtggtggagaatgt

SEQ ID NO: 286 - RNA, 22 nt, synthetic construct
  source 1..22: mol_type = other RNA
ttgtcaggttgcagtactccca

SEQ ID NO: 287 - RNA, 22 nt, synthetic construct
  source 1..22: mol_type = other RNA
tgattctgtcactggacattgt

SEQ ID NO: 288 - RNA, 22 nt, synthetic construct
  source 1..22: mol_type = other RNA
ttcctggaccacatggctttgc

SEQ ID NO: 289 - RNA, 22 nt, synthetic construct
  source 1..22: mol_type = other RNA
ttttagcaaggcaatatctgct

SEQ ID NO: 290 - RNA, 22 nt, synthetic construct
  source 1..22: mol_type = other RNA
tcctgcaccccaggcctttgct

SEQ ID NO: 291 - RNA, 22 nt, synthetic construct
  source 1..22: mol_type = other RNA
tgaccacagtcccttctgtgtc

SEQ ID NO: 292 - RNA, 22 nt, synthetic construct
  source 1..22: mol_type = other RNA
tttctgtgtctgagcatcgcgt

SEQ ID NO: 293 - RNA, 22 nt, synthetic construct
  source 1..22: mol_type = other RNA
ttcaggttgcagtactcccacc

SEQ ID NO: 294 - RNA, 22 nt, synthetic construct
  source 1..22: mol_type = other RNA
tgtgtctgagcatcgcgtcagg

SEQ ID NO: 295 - RNA, 22 nt, synthetic construct
  source 1..22: mol_type = other RNA
ttggtaaaacaccaagggcctg

SEQ ID NO: 296 - RNA, 20 nt, synthetic construct
  source 1..20: mol_type = other RNA
tggtcatctatgacaccaca

SEQ ID NO: 297 - RNA, 20 nt, synthetic construct
  source 1..20: mol_type = other RNA
aggctcattctccaccacta

SEQ ID NO: 298 - RNA, 20 nt, synthetic construct
  source 1..20: mol_type = other RNA
atggacagagttatcgagga

SEQ ID NO: 299 - RNA, 20 nt, synthetic construct
  source 1..20: mol_type = other RNA
tgccaagcttggtcatctaa

SEQ ID NO: 300 - RNA, 20 nt, synthetic construct
  source 1..20: mol_type = other RNA
tgcaacctgacacaatgcta

SEQ ID NO: 301 - RNA, 20 nt, synthetic construct
  source 1..20: mol_type = other RNA
agttatcgaggcacattcta

SEQ ID NO: 302 - RNA, 20 nt, synthetic construct
  source 1..20: mol_type = other RNA
aagcttggtcatctatgaca

SEQ ID NO: 303 - RNA, 20 nt, synthetic construct
  source 1..20: mol_type = other RNA
catggtgatggacagagtta

SEQ ID NO: 304 - RNA, 20 nt, synthetic construct
  source 1..20: mol_type = other RNA
tggacagagttatcgaggca

SEQ ID NO: 305 - RNA, 20 nt, synthetic construct
  source 1..20: mol_type = other RNA
ggcctgaccaggaactacta

SEQ ID NO: 306 - RNA, 20 nt, synthetic construct
  source 1..20: mol_type = other RNA
aagcaccacctgagaaaaga

SEQ ID NO: 307 - RNA, 20 nt, synthetic construct
  source 1..20: mol_type = other RNA
gagttatcgaggcacattca

SEQ ID NO: 308 - RNA, 20 nt, synthetic construct
  source 1..20: mol_type = other RNA
acctgccaagcttggtcata

SEQ ID NO: 309 - RNA, 20 nt, synthetic construct
  source 1..20: mol_type = other RNA
aacttgccaagcttggtcaa

SEQ ID NO: 310 - RNA, 20 nt, synthetic construct
  source 1..20: mol_type = other RNA
gaaatccagatcctgtggca

SEQ ID NO: 311 - RNA, 20 nt, synthetic construct
  source 1..20: mol_type = other RNA
aacctgacacaatgctcaga

SEQ ID NO: 312 - RNA, 20 nt, synthetic construct
  source 1..20: mol_type = other RNA
ccatggtgatggacagagta

SEQ ID NO: 313 - RNA, 20 nt, synthetic construct
  source 1..20: mol_type = other RNA
cagagttatcgaggcacata

SEQ ID NO: 314 - RNA, 20 nt, synthetic construct
  source 1..20: mol_type = other RNA
tgccaagcttggtcatctaa

SEQ ID NO: 315 - RNA, 20 nt, synthetic construct
  source 1..20: mol_type = other RNA
tcaagtgtccttgcaactca

SEQ ID NO: 316 - RNA, 20 nt, synthetic construct
  source 1..20: mol_type = other RNA
catctatgacaccacactca

SEQ ID NO: 317 - RNA, 20 nt, synthetic construct
  source 1..20: mol_type = other RNA
aacctgccaagcttggtcaa

SEQ ID NO: 318 - RNA, 20 nt, synthetic construct
  source 1..20: mol_type = other RNA
gaacaagcaccgactgagca

SEQ ID NO: 319 - RNA, 20 nt, synthetic construct
  source 1..20: mol_type = other RNA
gttatcgaggctcattctca

SEQ ID NO: 320 - RNA, 20 nt, synthetic construct
  source 1..20: mol_type = other RNA
gaatcaagtgtccttgcaaa

SEQ ID NO: 321 - RNA, 20 nt, synthetic construct
  source 1..20: mol_type = other RNA
gtcagatgggagtactgcaa

SEQ ID NO: 322 - RNA, 20 nt, synthetic construct
  source 1..20: mol_type = other RNA
gcacattctccaccactgta

SEQ ID NO: 323 - RNA, 20 nt, synthetic construct
  source 1..20: mol_type = other RNA
gccaagcttggtcatctata

SEQ ID NO: 324 - RNA, 20 nt, synthetic construct
  source 1..20: mol_type = other RNA
tactgcaacctgacacaata

SEQ ID NO: 325 - RNA, 20 nt, synthetic construct
  source 1..20: mol_type = other RNA
tgctaccatggtgatggaca

SEQ ID NO: 326 - RNA, 20 nt, synthetic construct
  source 1..20: mol_type = other RNA
ttggtcatccatgacaccaa

SEQ ID NO: 327 - RNA, 20 nt, synthetic construct
  source 1..20: mol_type = other RNA
acccaaatgctggcttgata

SEQ ID NO: 328 - RNA, 20 nt, synthetic construct
  source 1..20: mol_type = other RNA
caggattgctaccatggtga

SEQ ID NO: 329 - RNA, 20 nt, synthetic construct
  source 1..20: mol_type = other RNA
ggcctgaccaggaactacta

SEQ ID NO: 330 - RNA, 20 nt, synthetic construct
  source 1..20: mol_type = other RNA
aaggacctgccaagcttgga

SEQ ID NO: 331 - RNA, 20 nt, synthetic construct
  source 1..20: mol_type = other RNA
ttccgaacaagcaccgacta

SEQ ID NO: 332 - RNA, 20 nt, synthetic construct
  source 1..20: mol_type = other RNA
ggagtactgcaacctgacga

SEQ ID NO: 333 - RNA, 20 nt, synthetic construct
  source 1..20: mol_type = other RNA
acaggaaggacatgtcagta

SEQ ID NO: 334 - RNA, 20 nt, synthetic construct
  source 1..20: mol_type = other RNA
caagcaccacctgagaaaaa

SEQ ID NO: 335 - RNA, 20 nt, synthetic construct
  source 1..20: mol_type = other RNA
acacaatgctcagacgcaga

SEQ ID NO: 336 - RNA, 20 nt, synthetic construct
  source 1..20: mol_type = other RNA
ggaaggacatgtcagtctta

SEQ ID NO: 337 - RNA, 20 nt, synthetic construct
  source 1..20: mol_type = other RNA
gtggcagccccttattgtta

SEQ ID NO: 338 - RNA, 20 nt, synthetic construct
  source 1..20: mol_type = other RNA
gagattcgcccttggtgtta

SEQ ID NO: 339 - RNA, 20 nt, synthetic construct
  source 1..20: mol_type = other RNA
gtcagatgggagtactgcaa

SEQ ID NO: 340 - RNA, 20 nt, synthetic construct
  source 1..20: mol_type = other RNA
tgaccaggaactactgcaga

SEQ ID NO: 341 - RNA, 20 nt, synthetic construct
  source 1..20: mol_type = other RNA
ctgaagaagcaccaactgaa

SEQ ID NO: 342 - RNA, 20 nt, synthetic construct
  source 1..20: mol_type = other RNA
cagtgtcaggtgggagtaca

SEQ ID NO: 343 - RNA, 20 nt, synthetic construct
  source 1..20: mol_type = other RNA
gatgggagtactgcaaccta

SEQ ID NO: 344 - RNA, 20 nt, synthetic construct
  source 1..20: mol_type = other RNA
gatggacagagttatcgaga

SEQ ID NO: 345 - RNA, 20 nt, synthetic construct
  source 1..20: mol_type = other RNA
gaaggacatgtcagtcttga

SEQ ID NO: 346 - RNA, 20 nt, synthetic construct
  source 1..20: mol_type = other RNA
tccagtgacagaatcaagta

SEQ ID NO: 347 - RNA, 20 nt, synthetic construct
  source 1..20: mol_type = other RNA
cagaggacaacagaatatta

SEQ ID NO: 348 - RNA, 20 nt, synthetic construct
  source 1..20: mol_type = other RNA
cagccccttattgttataca

SEQ ID NO: 349 - RNA, 20 nt, synthetic construct
  source 1..20: mol_type = other RNA
tacccaaatggtggcctgaa

SEQ ID NO: 350 - RNA, 20 nt, synthetic construct
  source 1..20: mol_type = other RNA
gaggacaacagaatattata

SEQ ID NO: 351 - RNA, 20 nt, synthetic construct
  source 1..20: mol_type = other RNA
cagagttatcgaggctcata

SEQ ID NO: 352 - RNA, 20 nt, synthetic construct
  source 1..20: mol_type = other RNA
cccggttccaagcctagaga

SEQ ID NO: 353 - RNA, 20 nt, synthetic construct
  source 1..20: mol_type = other RNA
aggacaacagaatattatca

SEQ ID NO: 354 - RNA, 20 nt, synthetic construct
  source 1..20: mol_type = other RNA
gtcaggtgggagtactgcaa

SEQ ID NO: 355 - RNA, 20 nt, synthetic construct
  source 1..20: mol_type = other RNA
tgtcacaggaaggacatgta

SEQ ID NO: 356 - RNA, 20 nt, synthetic construct
  source 1..20: mol_type = other RNA
ctgtggcagccccttattga

SEQ ID NO: 357 - RNA, 20 nt, synthetic construct
  source 1..20: mol_type = other RNA
ggtcctctatgacaccacaa

SEQ ID NO: 358 - RNA, 20 nt, synthetic construct
  source 1..20: mol_type = other RNA
tctgaagaagcaccaacgga

SEQ ID NO: 359 - RNA, 20 nt, synthetic construct
  source 1..20: mol_type = other RNA
aggacatgtcagtcttggta

SEQ ID NO: 360 - RNA, 20 nt, synthetic construct
  source 1..20: mol_type = other RNA
agttatcgaggctcattcta

SEQ ID NO: 361 - RNA, 20 nt, synthetic construct
  source 1..20: mol_type = other RNA
acaggaagaacctgccaaga

SEQ ID NO: 362 - RNA, 20 nt, synthetic construct
  source 1..20: mol_type = other RNA
aagaagcaccaacggagcaa

SEQ ID NO: 363 - RNA, 20 nt, synthetic construct
  source 1..20: mol_type = other RNA
catcagaggacaacagaata

SEQ ID NO: 364 - RNA, 20 nt, synthetic construct
  source 1..20: mol_type = other RNA
ggaagaacttgccaagctta

SEQ ID NO: 365 - RNA, 20 nt, synthetic construct
  source 1..20: mol_type = other RNA
ctaccatggtgatggacaga

SEQ ID NO: 366 - RNA, 20 nt, synthetic construct
  source 1..20: mol_type = other RNA
aaggacatgtcagtcttgga

SEQ ID NO: 367 - RNA, 20 nt, synthetic construct
  source 1..20: mol_type = other RNA
gaagaacttgccaagcttga

SEQ ID NO: 368 - RNA, 20 nt, synthetic construct
  source 1..20: mol_type = other RNA
catgtcagtcttggtcctca

SEQ ID NO: 369 - RNA, 20 nt, synthetic construct
  source 1..20: mol_type = other RNA
ttgccaagcttggtcatcta

SEQ ID NO: 370 - RNA, 20 nt, synthetic construct
  source 1..20: mol_type = other RNA
ggtgggagtactgcaaccta

SEQ ID NO: 371 - RNA, 20 nt, synthetic construct
  source 1..20: mol_type = other RNA
tcagtcttggtcctctatga

SEQ ID NO: 372 - RNA, 20 nt, synthetic construct
  source 1..20: mol_type = other RNA
gttatcgaggcacattctca

SEQ ID NO: 373 - RNA, 20 nt, synthetic construct
  source 1..20: mol_type = other RNA
acaggaaggacatgtcaata

SEQ ID NO: 374 - RNA, 20 nt, synthetic construct
  source 1..20: mol_type = other RNA
tcagaggacaacagaatata

SEQ ID NO: 375 - RNA, 20 nt, synthetic construct
  source 1..20: mol_type = other RNA
atactacccaaatggtggca

SEQ ID NO: 376 - RNA, 20 nt, synthetic construct
  source 1..20: mol_type = other RNA
tcggaccccagaaaactaca

SEQ ID NO: 377 - RNA, 20 nt, synthetic construct
  source 1..20: mol_type = other RNA
cctgacacaatgtccagtga

SEQ ID NO: 378 - RNA, 20 nt, synthetic construct
  source 1..20: mol_type = other RNA
ctctatgacaccacactgga

SEQ ID NO: 379 - RNA, 20 nt, synthetic construct
  source 1..20: mol_type = other RNA
gtgacagaatcaagtgtcca

SEQ ID NO: 380 - RNA, 20 nt, synthetic construct
  source 1..20: mol_type = other RNA
aatcaagtgtccttgcaaca

SEQ ID NO: 381 - RNA, 20 nt, synthetic construct
  source 1..20: mol_type = other RNA
ccatgtggtccaggattgca

SEQ ID NO: 382 - RNA, 20 nt, synthetic construct
  source 1..20: mol_type = other RNA
gaagaacctgccaagcttga

SEQ ID NO: 383 - RNA, 20 nt, synthetic construct
  source 1..20: mol_type = other RNA
tggtgttacaccatggatca

SEQ ID NO: 384 - RNA, 20 nt, synthetic construct
  source 1..20: mol_type = other RNA
agaggacaacagaatattaa

SEQ ID NO: 385 - RNA, 20 nt, synthetic construct
  source 1..20: mol_type = other RNA
tggcagccccttggtgttaa

SEQ ID NO: 386 - RNA, 20 nt, synthetic construct
  source 1..20: mol_type = other RNA
attgctaccatggtgatgga

SEQ ID NO: 387 - RNA, 20 nt, synthetic construct
  source 1..20: mol_type = other RNA
caggaatccagatgctgaga

SEQ ID NO: 388 - RNA, 20 nt, synthetic construct
  source 1..20: mol_type = other RNA
caggaatccagatcctgtga

SEQ ID NO: 389 - RNA, 20 nt, synthetic construct
  source 1..20: mol_type = other RNA
gtcacaggaaggacctgcca

SEQ ID NO: 390 - RNA, 20 nt, synthetic construct
  source 1..20: mol_type = other RNA
caggaaggacatgtcagtca

SEQ ID NO: 391 - RNA, 20 nt, synthetic construct
  source 1..20: mol_type = other RNA
caggaactactgcaggaata

SEQ ID NO: 392 - RNA, 20 nt, synthetic construct
  source 1..20: mol_type = other RNA
actgcaacctgacacaatga

SEQ ID NO: 393 - RNA, 20 nt, synthetic construct
  source 1..20: mol_type = other RNA
ctacccaaatgctggcttga

SEQ ID NO: 394 - RNA, 20 nt, synthetic construct
  source 1..20: mol_type = other RNA
caccatggatcccagtgtca

SEQ ID NO: 395 - RNA, 20 nt, synthetic construct
  source 1..20: mol_type = other RNA
gaacttgccaagcttggtca

SEQ ID NO: 396 - RNA, 20 nt, synthetic construct
  source 1..20: mol_type = other RNA
acctgacacaatgctcagaa

SEQ ID NO: 397 - RNA, 20 nt, synthetic construct
  source 1..20: mol_type = other RNA
ctgcaacctgacacaatgca

SEQ ID NO: 398 - RNA, 20 nt, synthetic construct
  source 1..20: mol_type = other RNA
acaagcaccaactgagcaaa

SEQ ID NO: 399 - RNA, 20 nt, synthetic construct
  source 1..20: mol_type = other RNA
cccttggtgttataccatga

SEQ ID NO: 400 - RNA, 20 nt, synthetic construct
  source 1..20: mol_type = other RNA
taccattatggacagagtta

SEQ ID NO: 401 - RNA, 20 nt, synthetic construct
  source 1..20: mol_type = other RNA
tgccgaaatccagatcctga

SEQ ID NO: 402 - RNA, 20 nt, synthetic construct
  source 1..20: mol_type = other RNA
aatccagatgctgagattca

SEQ ID NO: 403 - RNA, 20 nt, synthetic construct
  source 1..20: mol_type = other RNA
cgaggcacattctccaccaa

SEQ ID NO: 404 - RNA, 20 nt, synthetic construct
  source 1..20: mol_type = other RNA
tacccaaatgctggcctgaa

SEQ ID NO: 405 - RNA, 20 nt, synthetic construct
  source 1..20: mol_type = other RNA
actgcaggaatccagatgca

SEQ ID NO: 406 - RNA, 20 nt, synthetic construct
  source 1..20: mol_type = other RNA
ggacagagttatcgaggcaa

SEQ ID NO: 407 - RNA, 20 nt, synthetic construct
  source 1..20: mol_type = other RNA
ctcagacgcagaagggacta

SEQ ID NO: 408 - RNA, 20 nt, synthetic construct
  source 1..20: mol_type = other RNA
agaactactgccgaaatcca

SEQ ID NO: 409 - RNA, 20 nt, synthetic construct
  source 1..20: mol_type = other RNA
gcttggtcatctatgacaca

SEQ ID NO: 410 - RNA, 20 nt, synthetic construct
  source 1..20: mol_type = other RNA
cacaggaagaacatgtcaga

SEQ ID NO: 411 - RNA, 20 nt, synthetic construct
  source 1..20: mol_type = other RNA
caaatgctggcctgaccaga

SEQ ID NO: 412 - RNA, 20 nt, synthetic construct
  source 1..20: mol_type = other RNA
agaagcaccaactgaaaaca

SEQ ID NO: 413 - RNA, 20 nt, synthetic construct
  source 1..20: mol_type = other RNA
caccacactggcatcagaga

SEQ ID NO: 414 - RNA, 20 nt, synthetic construct
  source 1..20: mol_type = other RNA
ggattgctaccatggtgata

SEQ ID NO: 415 - RNA, 20 nt, synthetic construct
  source 1..20: mol_type = other RNA
atcgaggctcattctccaca

SEQ ID NO: 416 - RNA, 20 nt, synthetic construct
  source 1..20: mol_type = other RNA
gcatcagaggacaacagaaa

SEQ ID NO: 417 - RNA, 20 nt, synthetic construct
  source 1..20: mol_type = other RNA
acacaatgtccagtgacaga

SEQ ID NO: 418 - RNA, 20 nt, synthetic construct
  source 1..20: mol_type = other RNA
ggctccttctgaacaagcaa

SEQ ID NO: 419 - RNA, 20 nt, synthetic construct
  source 1..20: mol_type = other RNA
aagcaccgactgagcaaaga

SEQ ID NO: 420 - RNA, 20 nt, synthetic construct
  source 1..20: mol_type = other RNA
tggcatcagaggacaacaga

SEQ ID NO: 421 - RNA, 20 nt, synthetic construct
  source 1..20: mol_type = other RNA
aagaacttgccaagcttgga

SEQ ID NO: 422 - RNA, 20 nt, synthetic construct
  source 1..20: mol_type = other RNA
ggtccaggattgctaccata

SEQ ID NO: 423 - RNA, 20 nt, synthetic construct
  source 1..20: mol_type = other RNA
ttcgcccttggtgttataca

SEQ ID NO: 424 - RNA, 20 nt, synthetic construct
  source 1..20: mol_type = other RNA
taccatggatcccagtgtca

SEQ ID NO: 425 - RNA, 20 nt, synthetic construct
  source 1..20: mol_type = other RNA
ccaccactgtcacaggaaga

SEQ ID NO: 426 - RNA, 20 nt, synthetic construct
  source 1..20: mol_type = other RNA
atcccagtgtcaggtgggaa

SEQ ID NO: 427 - RNA, 20 nt, synthetic construct
  source 1..20: mol_type = other RNA
cagaaaactacccaaatgca

SEQ ID NO: 428 - RNA, 20 nt, synthetic construct
  source 1..20: mol_type = other RNA
cccaaatgctggcttgatca

SEQ ID NO: 429 - RNA, 20 nt, synthetic construct
  source 1..20: mol_type = other RNA
tggggtgcaggagtgctaca

SEQ ID NO: 430 - RNA, 20 nt, synthetic construct
  source 1..20: mol_type = other RNA
accccagaaaactacccaaa

SEQ ID NO: 431 - RNA, 20 nt, synthetic construct
  source 1..20: mol_type = other RNA
cctgacacaatgctcagaca

SEQ ID NO: 432 - RNA, 20 nt, synthetic construct
  source 1..20: mol_type = other RNA
tggtgttataccatggatca

SEQ ID NO: 433 - RNA, 20 nt, synthetic construct
  source 1..20: mol_type = other RNA
atggatcccagtgtcaggta

SEQ ID NO: 434 - RNA, 20 nt, synthetic construct
  source 1..20: mol_type = other RNA
gcttcttctgaagaagcaca

SEQ ID NO: 435 - RNA, 20 nt, synthetic construct
  source 1..20: mol_type = other RNA
atagtcggaccccagaaaaa

SEQ ID NO: 436 - RNA, 20 nt, synthetic construct
  source 1..20: mol_type = other RNA
taccatggatcccaatgtca

SEQ ID NO: 437 - RNA, 20 nt, synthetic construct
  source 1..20: mol_type = other RNA
atcagaggacaacagaataa

SEQ ID NO: 438 - RNA, 20 nt, synthetic construct
  source 1..20: mol_type = other RNA
cacaactcccacggtggtca

SEQ ID NO: 439 - RNA, 20 nt, synthetic construct
  source 1..20: mol_type = other RNA
gaggctccttccgaacaaga

SEQ ID NO: 440 - RNA, 20 nt, synthetic construct
  source 1..20: mol_type = other RNA
gcaacctgacacaatgtcca

SEQ ID NO: 441 - RNA, 20 nt, synthetic construct
  source 1..20: mol_type = other RNA
tcctgtggcagccccttata

SEQ ID NO: 442 - RNA, 20 nt, synthetic construct
  source 1..20: mol_type = other RNA
caggaaggacctgccaagca

SEQ ID NO: 443 - RNA, 20 nt, synthetic construct
  source 1..20: mol_type = other RNA
aatccagatcctgtggcaga

SEQ ID NO: 444 - RNA, 20 nt, synthetic construct
  source 1..20: mol_type = other RNA
tacccaaatgctggcttgaa

SEQ ID NO: 445 - RNA, 20 nt, synthetic construct
  source 1..20: mol_type = other RNA
ggacagagttatcaaggcaa

SEQ ID NO: 446 - RNA, 20 nt, synthetic construct
  source 1..20: mol_type = other RNA
actgagcaaaggcctgggga

SEQ ID NO: 447 - RNA, 20 nt, synthetic construct
  source 1..20: mol_type = other RNA
caccacaccagcatagtcga

SEQ ID NO: 448 - RNA, 20 nt, synthetic construct
  source 1..20: mol_type = other RNA
cagatgctgagattcgccca

SEQ ID NO: 449 - RNA, 20 nt, synthetic construct
  source 1..20: mol_type = other RNA
gcaccaactgagcaaaggca

SEQ ID NO: 450 - RNA, 20 nt, synthetic construct
  source 1..20: mol_type = other RNA
atgacaccacaccagcataa

SEQ ID NO: 451 - RNA, 20 nt, synthetic construct
  source 1..20: mol_type = other RNA
aagaagcaccaactgaaaaa

SEQ ID NO: 452 - RNA, 20 nt, synthetic construct
  source 1..20: mol_type = other RNA
gttccaagcctagaggctca

SEQ ID NO: 453 - RNA, 20 nt, synthetic construct
  source 1..20: mol_type = other RNA
aacctgacgcgatgctcaga

SEQ ID NO: 454 - RNA, 20 nt, synthetic construct
  source 1..20: mol_type = other RNA
acttgccaagcttggtcata

SEQ ID NO: 455 - RNA, 20 nt, synthetic construct
  source 1..20: mol_type = other RNA
acactggcatcagaggacaa

SEQ ID NO: 456 - RNA, 20 nt, synthetic construct
  source 1..20: mol_type = other RNA
tgctggcctgaccaggaaca

SEQ ID NO: 457 - RNA, 20 nt, synthetic construct
  source 1..20: mol_type = other RNA
gttataccatggatcccaga

SEQ ID NO: 458 - RNA, 20 nt, synthetic construct
  source 1..20: mol_type = other RNA
caactgagcaaaggcctgga

SEQ ID NO: 459 - RNA, 20 nt, synthetic construct
  source 1..20: mol_type = other RNA
caggtgggagtactgcaaca

SEQ ID NO: 460 - RNA, 20 nt, synthetic construct
  source 1..20: mol_type = other RNA
ttatcgaggcacattctcca

SEQ ID NO: 461 - RNA, 20 nt, synthetic construct
  source 1..20: mol_type = other RNA
gcaaagccccggggtccaga

SEQ ID NO: 462 - RNA, 20 nt, synthetic construct
  source 1..20: mol_type = other RNA
acctgagcaaagccatgtga

SEQ ID NO: 463 - RNA, 20 nt, synthetic construct
  source 1..20: mol_type = other RNA
acacgatgctcagatgcaga

SEQ ID NO: 464 - RNA, 20 nt, synthetic construct
  source 1..20: mol_type = other RNA
gacatgtcaatcttggtcaa

SEQ ID NO: 465 - RNA, 20 nt, synthetic construct
  source 1..20: mol_type = other RNA
cagatcctgtggcagcccca

SEQ ID NO: 466 - RNA, 20 nt, synthetic construct
  source 1..20: mol_type = other RNA
tcctcacaactcccacggta

SEQ ID NO: 467 - RNA, 20 nt, synthetic construct
  source 1..20: mol_type = other RNA
agcctagaggctccttctga

SEQ ID NO: 468 - RNA, 20 nt, synthetic construct
  source 1..20: mol_type = other RNA
acaatgaactactgcaggaa

SEQ ID NO: 469 - RNA, 20 nt, synthetic construct
  source 1..20: mol_type = other RNA
gtgacagaatcaagtgtcca

SEQ ID NO: 470 - RNA, 20 nt, synthetic construct
  source 1..20: mol_type = other RNA
cactgtcacaggaaggacca

SEQ ID NO: 471 - RNA, 20 nt, synthetic construct
  source 1..20: mol_type = other RNA
tcttggtcctctatgacaca

SEQ ID NO: 472 - RNA, 20 nt, synthetic construct
  source 1..20: mol_type = other RNA
aatgctcagacgcagaagga

SEQ ID NO: 473 - RNA, 20 nt, synthetic construct
  source 1..20: mol_type = other RNA
tgaactactgcaggaatcca

SEQ ID NO: 474 - RNA, 20 nt, synthetic construct
  source 1..20: mol_type = other RNA
gtggtccaggattgctacca

SEQ ID NO: 475 - RNA, 20 nt, synthetic construct
  source 1..20: mol_type = other RNA
gggtgcaggagtgctaccaa

SEQ ID NO: 476 - RNA, 20 nt, synthetic construct
  source 1..20: mol_type = other RNA
atctatgacaccacaccaga

SEQ ID NO: 477 - RNA, 20 nt, synthetic construct
  source 1..20: mol_type = other RNA
aatcaggtgtcctagagaca

SEQ ID NO: 478 - RNA, 20 nt, synthetic construct
  source 1..20: mol_type = other RNA
tccaggattgctaccatgga

SEQ ID NO: 479 - RNA, 20 nt, synthetic construct
  source 1..20: mol_type = other RNA
tgagcaaagccatgtggtca

SEQ ID NO: 480 - RNA, 20 nt, synthetic construct
  source 1..20: mol_type = other RNA
ctactgccgaaatccagata

SEQ ID NO: 481 - RNA, 20 nt, synthetic construct
  source 1..20: mol_type = other RNA
tgagcaaaggcctggggtga

SEQ ID NO: 482 - RNA, 20 nt, synthetic construct
  source 1..20: mol_type = other RNA
agcaaaggcctggggtgcaa

SEQ ID NO: 483 - RNA, 20 nt, synthetic construct
  source 1..20: mol_type = other RNA
tgtcaatcttggtcatccaa

SEQ ID NO: 484 - RNA, 20 nt, synthetic construct
  source 1..20: mol_type = other RNA
aagcaccaactgaaaacaga

SEQ ID NO: 485 - RNA, 20 nt, synthetic construct
  source 1..20: mol_type = other RNA
ggaaacccccggggtacaga

SEQ ID NO: 486 - RNA, 20 nt, synthetic construct
  source 1..20: mol_type = other RNA
ggaccccagaaaactaccca

SEQ ID NO: 487 - RNA, 20 nt, synthetic construct
  source 1..20: mol_type = other RNA
tcatccatgacaccacacca

SEQ ID NO: 488 - RNA, 20 nt, synthetic construct
  source 1..20: mol_type = other RNA
aggaaacccccggggtacaa

SEQ ID NO: 489 - RNA, 20 nt, synthetic construct
  source 1..20: mol_type = other RNA
tgctgagattcgcccttgga

SEQ ID NO: 490 - RNA, 20 nt, synthetic construct
  source 1..20: mol_type = other RNA
ggtcatctatgacaccacaa

SEQ ID NO: 491 - RNA, 20 nt, synthetic construct
  source 1..20: mol_type = other RNA
gttataccatggatcccaaa

SEQ ID NO: 492 - RNA, 20 nt, synthetic construct
  source 1..20: mol_type = other RNA
accgactgagcaaaggccta

SEQ ID NO: 493 - RNA, 20 nt, synthetic construct
  source 1..20: mol_type = other RNA
actgcaggaatccagatcca

SEQ ID NO: 494 - RNA, 20 nt, synthetic construct
  source 1..20: mol_type = other RNA
gttacaccatggatcccaga

SEQ ID NO: 495 - RNA, 20 nt, synthetic construct
  source 1..20: mol_type = other RNA
ccttctgaagaagcaccaaa

SEQ ID NO: 496 - RNA, 20 nt, synthetic construct
  source 1..20: mol_type = other RNA
ctactaccattatggacaga

SEQ ID NO: 497 - RNA, 20 nt, synthetic construct
  source 1..20: mol_type = other RNA
ccaagcttggtcatctatga

SEQ ID NO: 498 - RNA, 20 nt, synthetic construct
  source 1..20: mol_type = other RNA
gtgttttaccatggacccca

SEQ ID NO: 499 - RNA, 20 nt, synthetic construct
  source 1..20: mol_type = other RNA
aaggcctggggtgcaggaga

SEQ ID NO: 500 - RNA, 20 nt, synthetic construct
  source 1..20: mol_type = other RNA
ggtggtcccagttccaagca

SEQ ID NO: 501 - RNA, 20 nt, synthetic construct
  source 1..20: mol_type = other RNA
cctggggtgcaggagtgcta

SEQ ID NO: 502 - RNA, 20 nt, synthetic construct
  source 1..20: mol_type = other RNA
cagaggaccccagaaaacta

SEQ ID NO: 503 - RNA, 20 nt, synthetic construct
  source 1..20: mol_type = other RNA
tgctcagacacagaagggaa

SEQ ID NO: 504 - RNA, 20 nt, synthetic construct
  source 1..20: mol_type = other RNA
cccttggtgttacaccatga

SEQ ID NO: 505 - RNA, 20 nt, synthetic construct
  source 1..20: mol_type = other RNA
ttcgcccttggtgttacaca

SEQ ID NO: 506 - RNA, 20 nt, synthetic construct
  source 1..20: mol_type = other RNA
gagcaaagccatgtggtcca

SEQ ID NO: 507 - RNA, 20 nt, synthetic construct
  source 1..20: mol_type = other RNA
ccactgtcacaggaaggaca

SEQ ID NO: 508 - RNA, 20 nt, synthetic construct
  source 1..20: mol_type = other RNA
tggtggcctgaccaggaaca

SEQ ID NO: 509 - RNA, 20 nt, synthetic construct
  source 1..20: mol_type = other RNA
gccaagcttggtcatctata

SEQ ID NO: 510 - RNA, 20 nt, synthetic construct
  source 1..20: mol_type = other RNA
gtgcaggagtgctaccacga

SEQ ID NO: 511 - RNA, 20 nt, synthetic construct
  source 1..20: mol_type = other RNA
cctagaggctccttccgaaa

SEQ ID NO: 512 - RNA, 20 nt, synthetic construct
  source 1..20: mol_type = other RNA
acctgagaaaagccctgtga

SEQ ID NO: 513 - RNA, 20 nt, synthetic construct
  source 1..20: mol_type = other RNA
gcagccccttggtgttataa

SEQ ID NO: 514 - RNA, 20 nt, synthetic construct
  source 1..20: mol_type = other RNA
cccagaaaactacccaaata

SEQ ID NO: 515 - RNA, 20 nt, synthetic construct
  source 1..20: mol_type = other RNA
ctccttccgaacaagcacca

SEQ ID NO: 516 - RNA, 20 nt, synthetic construct
  source 1..20: mol_type = other RNA
agaatcaggtgtcctagaga

SEQ ID NO: 517 - RNA, 20 nt, synthetic construct
  source 1..20: mol_type = other RNA
aaactacccaaatgctggca

SEQ ID NO: 518 - RNA, 20 nt, synthetic construct
  source 1..20: mol_type = other RNA
ctactgcaggaatccagata

SEQ ID NO: 519 - RNA, 20 nt, synthetic construct
  source 1..20: mol_type = other RNA
caagcctagaggctccttca

SEQ ID NO: 520 - RNA, 20 nt, synthetic construct
  source 1..20: mol_type = other RNA
gaaggacatgtcaatcttga

SEQ ID NO: 521 - RNA, 20 nt, synthetic construct
  source 1..20: mol_type = other RNA
tccaccactgtcacaggaaa

SEQ ID NO: 522 - RNA, 20 nt, synthetic construct
  source 1..20: mol_type = other RNA
aatcttggtcatccatgaca

SEQ ID NO: 523 - RNA, 20 nt, synthetic construct
  source 1..20: mol_type = other RNA
aaatgtcctggaagcattga

SEQ ID NO: 524 - RNA, 20 nt, synthetic construct
  source 1..20: mol_type = other RNA
acaccagcatagtcggacca

SEQ ID NO: 525 - RNA, 20 nt, synthetic construct
  source 1..20: mol_type = other RNA
tgtcctggaagcattgtaga

SEQ ID NO: 526 - RNA, 20 nt, synthetic construct
  source 1..20: mol_type = other RNA
atgacaccacactggcatca

SEQ ID NO: 527 - RNA, 20 nt, synthetic construct
  source 1..20: mol_type = other RNA
cttggtgttttaccatggaa

SEQ ID NO: 528 - RNA, 20 nt, synthetic construct
  source 1..20: mol_type = other RNA
acgatgctcagatgcagaaa

SEQ ID NO: 529 - RNA, 20 nt, synthetic construct
  source 1..20: mol_type = other RNA
aagccatgtggtccaggata

SEQ ID NO: 530 - RNA, 20 nt, synthetic construct
  source 1..20: mol_type = other RNA
agtactgcaacctgacgcga

SEQ ID NO: 531 - RNA, 20 nt, synthetic construct
  source 1..20: mol_type = other RNA
aactactgcaggaatccaga

SEQ ID NO: 532 - RNA, 20 nt, synthetic construct
  source 1..20: mol_type = other RNA
ctgcaacctgacgcgatgca

SEQ ID NO: 533 - RNA, 20 nt, synthetic construct
  source 1..20: mol_type = other RNA
gcatcagaggaccccagaaa

SEQ ID NO: 534 - RNA, 20 nt, synthetic construct
  source 1..20: mol_type = other RNA
agaaacagaatcaggtgtca

SEQ ID NO: 535 - RNA, 20 nt, synthetic construct
  source 1..20: mol_type = other RNA
cagacacagaagggactgta

SEQ ID NO: 536 - RNA, 20 nt, synthetic construct
  source 1..20: mol_type = other RNA
tagaggctccttctgaacaa

SEQ ID NO: 537 - RNA, 20 nt, synthetic construct
  source 1..20: mol_type = other RNA
ggcctggggtgcaggagtga

SEQ ID NO: 538 - RNA, 20 nt, synthetic construct
  source 1..20: mol_type = other RNA
gtcaatcttggtcatctata

SEQ ID NO: 539 - RNA, 20 nt, synthetic construct
  source 1..20: mol_type = other RNA
attctccaccactgtcacaa

SEQ ID NO: 540 - RNA, 20 nt, synthetic construct
  source 1..20: mol_type = other RNA
ggagtactgcaacctgacaa

SEQ ID NO: 541 - RNA, 20 nt, synthetic construct
  source 1..20: mol_type = other RNA
aatgtccagtgacagaatca

SEQ ID NO: 542 - RNA, 20 nt, synthetic construct
  source 1..20: mol_type = other RNA
aaagccatgtggtccaggaa

SEQ ID NO: 543 - RNA, 20 nt, synthetic construct
  source 1..20: mol_type = other RNA
cagatattgccttgctaaaa

SEQ ID NO: 544 - RNA, 20 nt, synthetic construct
  source 1..20: mol_type = other RNA
caaaggcctggggtgcagga

SEQ ID NO: 545 - RNA, 20 nt, synthetic construct
  source 1..20: mol_type = other RNA
cacagaagggactgtggtca

SEQ ID NO: 546 - RNA, 20 nt, synthetic construct
  source 1..20: mol_type = other RNA
gcgatgctcagacacagaaa

SEQ ID NO: 547 - RNA, 20 nt, synthetic construct
  source 1..20: mol_type = other RNA
tgggagtactgcaacctgaa

SEQ ID NO: 548 - RNA, 20 nt, synthetic construct
  source 1..20: mol_type = other RNA
tgacgcgatgctcagacaca

SEQ ID NO: 549 - RNA, 20 nt, synthetic construct
  source 1..20: mol_type = other RNA
ggcccttggtgttttaccaa

SEQ ID NO: 550 - RNA, 20 nt, synthetic construct
  source 1..20: mol_type = other RNA
tgatggacagagttatcgaa

SEQ ID NO: 551 - RNA, 20 nt, synthetic construct
  source 1..20: mol_type = other RNA
acagaaaactacccaaatga

SEQ ID NO: 552 - RNA, 22 nt, synthetic construct
  source 1..22: mol_type = other RNA
  modified_base 1: mod_base = OTHER; note = 2'-O-methyl-uridine with phosphorothioate linkage
  modified_base 2: mod_base = OTHER; note = 2'-fluoro-uridine with phosphorothioate linkage
  modified_base 3: mod_base = OTHER; note = 2'-fluoro-cytidine
  modified_base 4: mod_base = OTHER; note = 2'-O-methyl-guanosine
  modified_base 5: mod_base = OTHER; note = 2'-fluoro-adenosine
  modified_base 6: mod_base = OTHER; note = 2'-O-methyl-uridine
  modified_base 7: mod_base = OTHER; note = 2'-fluoro-adenosine
  modified_base 8: mod_base = OTHER; note = 2'-O-methyl-adenosine
  modified_base 9: mod_base = OTHER; note = 2'-O-methyl-cytidine
  modified_base 10: mod_base = OTHER; note = 2'-fluoro-uridine
  modified_base 11: mod_base = OTHER; note = 2'-O-methyl-cytidine
  modified_base 12: mod_base = OTHER; note = 2'-O-methyl-uridine
  modified_base 13: mod_base = OTHER; note = 2'-O-methyl-guanosine
  modified_base 14: mod_base = OTHER; note = 2'-fluoro-uridine
  modified_base 15: mod_base = OTHER; note = 2'-O-methyl-cytidine
  modified_base 16: mod_base = OTHER; note = 2'-fluoro-cytidine
  modified_base 17: mod_base = OTHER; note = 2'-O-methyl-adenosine
  modified_base 18: mod_base = OTHER; note = 2'-O-methyl-uridine
  modified_base 19: mod_base = OTHER; note = 2'-O-methyl-cytidine
  modified_base 20: mod_base = OTHER; note = 2'-O-methyl-adenosine with phosphorothioate linkage
  modified_base 21: mod_base = OTHER; note = 2'-O-methyl-cytidine with phosphorothioate linkage
  modified_base 22: mod_base = OTHER; note = 2'-O-methyl-cytidine
ttcgataactctgtccatcacc

SEQ ID NO: 553 - RNA, 22 nt, synthetic construct
  source 1..22: mol_type = other RNA
  modified_base 1: mod_base = OTHER; note = 2'-O-methyl-uridine with phosphorothioate linkage
  modified_base 2: mod_base = OTHER; note = 2'-fluoro-cytidine with phosphorothioate linkage
  modified_base 3: mod_base = OTHER; note = 2'-fluoro-adenosine
  modified_base 4: mod_base = OTHER; note = 2'-O-methyl-uridine
  modified_base 5: mod_base = OTHER; note = 2'-fluoro-uridine
  modified_base 6: mod_base = OTHER; note = 2'-O-methyl-uridine
  modified_base 7: mod_base = OTHER; note = 2'-fluoro-guanosine
  modified_base 8: mod_base = OTHER; note = 2'-O-methyl-guanosine
  modified_base 9: mod_base = OTHER; note = 2'-O-methyl-guanosine
  modified_base 10: mod_base = OTHER; note = 2'-fluoro-uridine
  modified_base 11: mod_base = OTHER; note = 2'-O-methyl-adenosine
  modified_base 12: mod_base = OTHER; note = 2'-O-methyl-guanosine
  modified_base 13: mod_base = OTHER; note = 2'-O-methyl-uridine
  modified_base 14: mod_base = OTHER; note = 2'-fluoro-uridine
  modified_base 15: mod_base = OTHER; note = 2'-O-methyl-uridine
  modified_base 16: mod_base = OTHER; note = 2'-fluoro-uridine
  modified_base 17: mod_base = OTHER; note = 2'-O-methyl-cytidine
  modified_base 18: mod_base = OTHER; note = 2'-O-methyl-uridine
  modified_base 19: mod_base = OTHER; note = 2'-O-methyl-guanosine
  modified_base 20: mod_base = OTHER; note = 2'-O-methyl-uridine with phosphorothioate linkage
  modified_base 21: mod_base = OTHER; note = 2'-O-methyl-guanosine with phosphorothioate linkage
  modified_base 22: mod_base = OTHER; note = 2'-O-methyl-guanosine
tcatttgggtagttttctgtgg

SEQ ID NO: 554 - RNA, 22 nt, synthetic construct
  source 1..22: mol_type = other RNA
  modified_base 1: mod_base = OTHER; note = 2'-O-methyl-uridine with phosphorothioate linkage
  modified_base 2: mod_base = OTHER; note = 2'-fluoro-uridine with phosphorothioate linkage
  modified_base 3: mod_base = OTHER; note = 2'-fluoro-guanosine
  modified_base 4: mod_base = OTHER; note = 2'-O-methyl-guanosine
  modified_base 5: mod_base = OTHER; note = 2'-fluoro-uridine
  modified_base 6: mod_base = OTHER; note = 2'-O-methyl-guanosine
  modified_base 7: mod_base = OTHER; note = 2'-fluoro-uridine
  modified_base 8: mod_base = OTHER; note = 2'-O-methyl-cytidine
  modified_base 9: mod_base = OTHER; note = 2'-O-methyl-adenosine
  modified_base 10: mod_base = OTHER; note = 2'-fluoro-uridine
  modified_base 11: mod_base = OTHER; note = 2'-O-methyl-adenosine
  modified_base 12: mod_base = OTHER; note = 2'-O-methyl-guanosine
  modified_base 13: mod_base = OTHER; note = 2'-O-methyl-adenosine
  modified_base 14: mod_base = OTHER; note = 2'-fluoro-uridine
  modified_base 15: mod_base = OTHER; note = 2'-O-methyl-guanosine
  modified_base 16: mod_base = OTHER; note = 2'-fluoro-adenosine
  modified_base 17: mod_base = OTHER; note = 2'-O-methyl-cytidine
  modified_base 18: mod_base = OTHER; note = 2'-O-methyl-cytidine
  modified_base 19: mod_base = OTHER; note = 2'-O-methyl-adenosine
  modified_base 20: mod_base = OTHER; note = 2'-O-methyl-adenosine with phosphorothioate linkage
  modified_base 21: mod_base = OTHER; note = 2'-O-methyl-guanosine with phosphorothioate linkage
  modified_base 22: mod_base = OTHER; note = 2'-O-methyl-cytidine
ttggtgtcatagatgaccaagc

SEQ ID NO: 555 - RNA, 22 nt, synthetic construct
  source 1..22: mol_type = other RNA
  modified_base 1: mod_base = OTHER; note = 2'-O-methyl-uridine with phosphorothioate linkage
  modified_base 2: mod_base = OTHER; note = 2'-fluoro-adenosine with phosphorothioate linkage
  modified_base 3: mod_base = OTHER; note = 2'-fluoro-adenosine
  modified_base 4: mod_base = OTHER; note = 2'-O-methyl-guanosine
  modified_base 5: mod_base = OTHER; note = 2'-fluoro-cytidine
  modified_base 6: mod_base = OTHER; note = 2'-O-methyl-cytidine
  modified_base 7: mod_base = OTHER; note = 2'-fluoro-adenosine
  modified_base 8: mod_base = OTHER; note = 2'-O-methyl-guanosine
  modified_base 9: mod_base = OTHER; note = 2'-O-methyl-cytidine
  modified_base 10: mod_base = OTHER; note = 2'-fluoro-adenosine
  modified_base 11: mod_base = OTHER; note = 2'-O-methyl-uridine
  modified_base 12: mod_base = OTHER; note = 2'-O-methyl-uridine
  modified_base 13: mod_base = OTHER; note = 2'-O-methyl-uridine
  modified_base 14: mod_base = OTHER; note = 2'-fluoro-guanosine
  modified_base 15: mod_base = OTHER; note = 2'-O-methyl-guanosine
  modified_base 16: mod_base = OTHER; note = 2'-fluoro-guanosine
  modified_base 17: mod_base = OTHER; note = 2'-O-methyl-uridine
  modified_base 18: mod_base = OTHER; note = 2'-O-methyl-adenosine
  modified_base 19: mod_base = OTHER; note = 2'-O-methyl-guanosine
  modified_base 20: mod_base = OTHER; note = 2'-O-methyl-uridine with phosphorothioate linkage
  modified_base 21: mod_base = OTHER; note = 2'-O-methyl-adenosine with phosphorothioate linkage
  modified_base 22: mod_base = OTHER; note = 2'-O-methyl-uridine
taagccagcatttgggtagtat

SEQ ID NO: 556 - RNA, 22 nt, synthetic construct
  source 1..22: mol_type = other RNA
  modified_base 1: mod_base = OTHER; note = 2'-O-methyl-uridine with phosphorothioate linkage
  modified_base 2: mod_base = OTHER; note = 2'-fluoro-adenosine with phosphorothioate linkage
  modified_base 3: mod_base = OTHER; note = 2'-fluoro-guanosine
  modified_base 4: mod_base = OTHER; note = 2'-O-methyl-adenosine
  modified_base 5: mod_base = OTHER; note = 2'-fluoro-cytidine
  modified_base 6: mod_base = OTHER; note = 2'-O-methyl-uridine
  modified_base 7: mod_base = OTHER; note = 2'-fluoro-guanosine
  modified_base 8: mod_base = OTHER; note = 2'-O-methyl-adenosine
  modified_base 9: mod_base = OTHER; note = 2'-O-methyl-cytidine
  modified_base 10: mod_base = OTHER; note = 2'-fluoro-adenosine
  modified_base 11: mod_base = OTHER; note = 2'-O-methyl-uridine
  modified_base 12: mod_base = OTHER; note = 2'-O-methyl-guanosine
  modified_base 13: mod_base = OTHER; note = 2'-O-methyl-uridine
  modified_base 14: mod_base = OTHER; note = 2'-fluoro-cytidine
  modified_base 15: mod_base = OTHER; note = 2'-O-methyl-cytidine
  modified_base 16: mod_base = OTHER; note = 2'-fluoro-uridine
  modified_base 17: mod_base = OTHER; note = 2'-O-methyl-uridine
  modified_base 18: mod_base = OTHER; note = 2'-O-methyl-cytidine
  modified_base 19: mod_base = OTHER; note = 2'-O-methyl-cytidine
  modified_base 20: mod_base = OTHER; note = 2'-O-methyl-uridine with phosphorothioate linkage
  modified_base 21: mod_base = OTHER; note = 2'-O-methyl-guanosine with phosphorothioate linkage
  modified_base 22: mod_base = OTHER; note = 2'-O-methyl-uridine
tagactgacatgtccttcctgt

SEQ ID NO: 557 - RNA, 22 nt, synthetic construct
  source 1..22: mol_type = other RNA
  modified_base 1: mod_base = OTHER; note = 2'-O-methyl-uridine with phosphorothioate linkage
  modified_base 2: mod_base = OTHER; note = 2'-fluoro-adenosine with phosphorothioate linkage
  modified_base 3: mod_base = OTHER; note = 2'-fluoro-guanosine
  modified_base 4: mod_base = OTHER; note = 2'-O-methyl-uridine
  modified_base 5: mod_base = OTHER; note = 2'-fluoro-uridine
  modified_base 6: mod_base = OTHER; note = 2'-O-methyl-guanosine
  modified_base 7: mod_base = OTHER; note = 2'-fluoro-cytidine
  modified_base 8: mod_base = OTHER; note = 2'-O-methyl-adenosine
  modified_base 9: mod_base = OTHER; note = 2'-O-methyl-adenosine
  modified_base 10: mod_base = OTHER; note = 2'-fluoro-guanosine
  modified_base 11: mod_base = OTHER; note = 2'-O-methyl-guanosine
  modified_base 12: mod_base = OTHER; note = 2'-O-methyl-adenosine
  modified_base 13: mod_base = OTHER; note = 2'-O-methyl-cytidine
  modified_base 14: mod_base = OTHER; note = 2'-fluoro-adenosine
  modified_base 15: mod_base = OTHER; note = 2'-O-methyl-cytidine
  modified_base 16: mod_base = OTHER; note = 2'-fluoro-uridine
  modified_base 17: mod_base = OTHER; note = 2'-O-methyl-uridine
  modified_base 18: mod_base = OTHER; note = 2'-O-methyl-guanosine
  modified_base 19: mod_base = OTHER; note = 2'-O-methyl-adenosine
  modified_base 20: mod_base = OTHER; note = 2'-O-methyl-uridine with phosphorothioate linkage
  modified_base 21: mod_base = OTHER; note = 2'-O-methyl-uridine with phosphorothioate linkage
  modified_base 22: mod_base = OTHER; note = 2'-O-methyl-cytidine
tagttgcaaggacacttgattc

SEQ ID NO: 558 - RNA, 22 nt, synthetic construct
  source 1..22: mol_type = other RNA
  modified_base 1: mod_base = OTHER; note = 2'-O-methyl-uridine with phosphorothioate linkage
  modified_base 2: mod_base = OTHER; note = 2'-fluoro-cytidine with phosphorothioate linkage
  modified_base 3: mod_base = OTHER; note = 2'-fluoro-guanosine
  modified_base 4: mod_base = OTHER; note = 2'-O-methyl-adenosine
  modified_base 5: mod_base = OTHER; note = 2'-fluoro-uridine
  modified_base 6: mod_base = OTHER; note = 2'-O-methyl-adenosine
  modified_base 7: mod_base = OTHER; note = 2'-fluoro-adenosine
  modified_base 8: mod_base = OTHER; note = 2'-O-methyl-cytidine
  modified_base 9: mod_base = OTHER; note = 2'-O-methyl-uridine
  modified_base 10: mod_base = OTHER; note = 2'-fluoro-cytidine
  modified_base 11: mod_base = OTHER; note = 2'-O-methyl-uridine
  modified_base 12: mod_base = OTHER; note = 2'-O-methyl-guanosine
  modified_base 13: mod_base = OTHER; note = 2'-O-methyl-uridine
  modified_base 14: mod_base = OTHER; note = 2'-fluoro-cytidine
  modified_base 15: mod_base = OTHER; note = 2'-O-methyl-cytidine
  modified_base 16: mod_base = OTHER; note = 2'-fluoro-adenosine
  modified_base 17: mod_base = OTHER; note = 2'-O-methyl-uridine
  modified_base 18: mod_base = OTHER; note = 2'-O-methyl-cytidine
  modified_base 19: mod_base = OTHER; note = 2'-O-methyl-adenosine
  modified_base 20: mod_base = OTHER; note = 2'-O-methyl-cytidine with phosphorothioate linkage
  modified_base 21: mod_base = OTHER; note = 2'-O-methyl-cytidine with phosphorothioate linkage
  modified_base 22: mod_base = OTHER; note = 2'-O-methyl-adenosine
tcgataactctgtccatcacca

SEQ ID NO: 559 - RNA, 22 nt, synthetic construct
  source 1..22: mol_type = other RNA
  modified_base 1: mod_base = OTHER; note = 2'-O-methyl-uridine with phosphorothioate linkage
  modified_base 2: mod_base = OTHER; note = 2'-fluoro-uridine with phosphorothioate linkage
  modified_base 3: mod_base = OTHER; note = 2'-fluoro-adenosine
  modified_base 4: mod_base = OTHER; note = 2'-O-methyl-adenosine
  modified_base 5: mod_base = OTHER; note = 2'-fluoro-cytidine
  modified_base 6: mod_base = OTHER; note = 2'-O-methyl-uridine
  modified_base 7: mod_base = OTHER; note = 2'-fluoro-cytidine
  modified_base 8: mod_base = OTHER; note = 2'-O-methyl-uridine
  modified_base 9: mod_base = OTHER; note = 2'-O-methyl-guanosine
  modified_base 10: mod_base = OTHER; note = 2'-fluoro-uridine
  modified_base 11: mod_base = OTHER; note = 2'-O-methyl-cytidine
  modified_base 12: mod_base = OTHER; note = 2'-O-methyl-cytidine
  modified_base 13: mod_base = OTHER; note = 2'-O-methyl-adenosine
  modified_base 14: mod_base = OTHER; note = 2'-fluoro-uridine
  modified_base 15: mod_base = OTHER; note = 2'-O-methyl-cytidine
  modified_base 16: mod_base = OTHER; note = 2'-fluoro-adenosine
  modified_base 17: mod_base = OTHER; note = 2'-O-methyl-cytidine
  modified_base 18: mod_base = OTHER; note = 2'-O-methyl-cytidine
  modified_base 19: mod_base = OTHER; note = 2'-O-methyl-adenosine
  modified_base 20: mod_base = OTHER; note = 2'-O-methyl-uridine with phosphorothioate linkage
  modified_base 21: mod_base = OTHER; note = 2'-O-methyl-guanosine with phosphorothioate linkage
  modified_base 22: mod_base = OTHER; note = 2'-O-methyl-guanosine
ttaactctgtccatcaccatgg

SEQ ID NO: 560 - RNA, 22 nt, synthetic construct
  source 1..22: mol_type = other RNA
  modified_base 1: mod_base = OTHER; note = 2'-O-methyl-uridine with phosphorothioate linkage
  modified_base 2: mod_base = OTHER; note = 2'-fluoro-uridine with phosphorothioate linkage
  modified_base 3: mod_base = OTHER; note = 2'-fluoro-guanosine
  modified_base 4: mod_base = OTHER; note = 2'-O-methyl-adenosine
  modified_base 5: mod_base = OTHER; note = 2'-fluoro-guanosine
  modified_base 6: mod_base = OTHER; note = 2'-O-methyl-cytidine
  modified_base 7: mod_base = OTHER; note = 2'-fluoro-adenosine
  modified_base 8: mod_base = OTHER; note = 2'-O-methyl-uridine
  modified_base 9: mod_base = OTHER; note = 2'-O-methyl-uridine
  modified_base 10: mod_base = OTHER; note = 2'-fluoro-guanosine
  modified_base 11: mod_base = OTHER; note = 2'-O-methyl-uridine
  modified_base 12: mod_base = OTHER; note = 2'-O-methyl-guanosine
  modified_base 13: mod_base = OTHER; note = 2'-O-methyl-uridine
  modified_base 14: mod_base = OTHER; note = 2'-fluoro-cytidine
  modified_base 15: mod_base = OTHER; note = 2'-O-methyl-adenosine
  modified_base 16: mod_base = OTHER; note = 2'-fluoro-guanosine
  modified_base 17: mod_base = OTHER; note = 2'-O-methyl-guanosine
  modified_base 18: mod_base = OTHER; note = 2'-O-methyl-uridine
  modified_base 19: mod_base = OTHER; note = 2'-O-methyl-uridine
  modified_base 20: mod_base = OTHER; note = 2'-O-methyl-guanosine with phosphorothioate linkage
  modified_base 21: mod_base = OTHER; note = 2'-O-methyl-cytidine with phosphorothioate linkage
  modified_base 22: mod_base = OTHER; note = 2'-O-methyl-adenosine
ttgagcattgtgtcaggttgca

SEQ ID NO: 561 - RNA, 22 nt, synthetic construct
  source 1..22: mol_type = other RNA
  modified_base 1: mod_base = OTHER; note = 2'-O-methyl-uridine with phosphorothioate linkage
  modified_base 2: mod_base = OTHER; note = 2'-fluoro-guanosine with phosphorothioate linkage
  modified_base 3: mod_base = OTHER; note = 2'-fluoro-adenosine
  modified_base 4: mod_base = OTHER; note = 2'-O-methyl-uridine
  modified_base 5: mod_base = OTHER; note = 2'-fluoro-adenosine
  modified_base 6: mod_base = OTHER; note = 2'-O-methyl-adenosine
  modified_base 7: mod_base = OTHER; note = 2'-fluoro-cytidine
  modified_base 8: mod_base = OTHER; note = 2'-O-methyl-uridine
  modified_base 9: mod_base = OTHER; note = 2'-O-methyl-cytidine
  modified_base 10: mod_base = OTHER; note = 2'-fluoro-uridine
  modified_base 11: mod_base = OTHER; note = 2'-O-methyl-guanosine
  modified_base 12: mod_base = OTHER; note = 2'-O-methyl-uridine
  modified_base 13: mod_base = OTHER; note = 2'-O-methyl-cytidine
  modified_base 14: mod_base = OTHER; note = 2'-fluoro-cytidine
  modified_base 15: mod_base = OTHER; note = 2'-O-methyl-adenosine
  modified_base 16: mod_base = OTHER; note = 2'-fluoro-uridine
  modified_base 17: mod_base = OTHER; note = 2'-O-methyl-cytidine
  modified_base 18: mod_base = OTHER; note = 2'-O-methyl-adenosine
  modified_base 19: mod_base = OTHER; note = 2'-O-methyl-cytidine
  modified_base 20: mod_base = OTHER; note = 2'-O-methyl-cytidine with phosphorothioate linkage
  modified_base 21: mod_base = OTHER; note = 2'-O-methyl-adenosine with phosphorothioate linkage
  modified_base 22: mod_base = OTHER; note = 2'-O-methyl-uridine
tgataactctgtccatcaccat

SEQ ID NO: 562 - RNA, 22 nt, synthetic construct
  source 1..22: mol_type = other RNA
  modified_base 1: mod_base = OTHER; note = 2'-O-methyl-uridine with phosphorothioate linkage
  modified_base 2: mod_base = OTHER; note = 2'-fluoro-adenosine with phosphorothioate linkage
  modified_base 3: mod_base = OTHER; note = 2'-fluoro-uridine
  modified_base 4: mod_base = OTHER; note = 2'-O-methyl-adenosine
  modified_base 5: mod_base = OTHER; note = 2'-fluoro-adenosine
  modified_base 6: mod_base = OTHER; note = 2'-O-methyl-cytidine
  modified_base 7: mod_base = OTHER; note = 2'-fluoro-uridine
  modified_base 8: mod_base = OTHER; note = 2'-O-methyl-cytidine
  modified_base 9: mod_base = OTHER; note = 2'-O-methyl-uridine
  modified_base 10: mod_base = OTHER; note = 2'-fluoro-guanosine
  modified_base 11: mod_base = OTHER; note = 2'-O-methyl-uridine
  modified_base 12: mod_base = OTHER; note = 2'-O-methyl-cytidine
  modified_base 13: mod_base = OTHER; note = 2'-O-methyl-cytidine
  modified_base 14: mod_base = OTHER; note = 2'-fluoro-adenosine
  modified_base 15: mod_base = OTHER; note = 2'-O-methyl-uridine
  modified_base 16: mod_base = OTHER; note = 2'-fluoro-uridine
  modified_base 17: mod_base = OTHER; note = 2'-O-methyl-adenosine
  modified_base 18: mod_base = OTHER; note = 2'-O-methyl-cytidine
  modified_base 19: mod_base = OTHER; note = 2'-O-methyl-cytidine
  modified_base 20: mod_base = OTHER; note = 2'-O-methyl-guanosine with phosphorothioate linkage
  modified_base 21: mod_base = OTHER; note = 2'-O-methyl-uridine with phosphorothioate linkage
  modified_base 22: mod_base = OTHER; note = 2'-O-methyl-guanosine
tataactctgtccattaccgtg

SEQ ID NO: 563 - RNA, 22 nt, synthetic construct
  source 1..22: mol_type = other RNA
  modified_base 1: mod_base = OTHER; note = 2'-O-methyl-uridine with phosphorothioate linkage
  modified_base 2: mod_base = OTHER; note = 2'-fluoro-uridine with phosphorothioate linkage
  modified_base 3: mod_base = OTHER; note = 2'-fluoro-cytidine
  modified_base 4: mod_base = OTHER; note = 2'-O-methyl-adenosine
  modified_base 5: mod_base = OTHER; note = 2'-fluoro-uridine
  modified_base 6: mod_base = OTHER; note = 2'-O-methyl-adenosine
  modified_base 7: mod_base = OTHER; note = 2'-fluoro-guanosine
  modified_base 8: mod_base = OTHER; note = 2'-O-methyl-adenosine
  modified_base 9: mod_base = OTHER; note = 2'-O-methyl-uridine
  modified_base 10: mod_base = OTHER; note = 2'-fluoro-guanosine
  modified_base 11: mod_base = OTHER; note = 2'-O-methyl-adenosine
  modified_base 12: mod_base = OTHER; note = 2'-O-methyl-cytidine
  modified_base 13: mod_base = OTHER; note = 2'-O-methyl-cytidine
  modified_base 14: mod_base = OTHER; note = 2'-fluoro-adenosine
  modified_base 15: mod_base = OTHER; note = 2'-O-methyl-adenosine
  modified_base 16: mod_base = OTHER; note = 2'-fluoro-guanosine
  modified_base 17: mod_base = OTHER; note = 2'-O-methyl-cytidine
  modified_base 18: mod_base = OTHER; note = 2'-O-methyl-uridine
  modified_base 19: mod_base = OTHER; note = 2'-O-methyl-uridine
  modified_base 20: mod_base = OTHER; note = 2'-O-methyl-guanosine with phosphorothioate linkage
  modified_base 21: mod_base = OTHER; note = 2'-O-methyl-guanosine with phosphorothioate linkage
  modified_base 22: mod_base = OTHER; note = 2'-O-methyl-cytidine
ttcatagatgaccaagcttggc

SEQ ID NO: 564 - RNA, 22 nt, synthetic construct
  source 1..22: mol_type = other RNA
  modified_base 1: mod_base = OTHER; note = 2'-O-methyl-uridine with phosphorothioate linkage
  modified_base 2: mod_base = OTHER; note = 2'-fluoro-adenosine with phosphorothioate linkage
  modified_base 3: mod_base = OTHER; note = 2'-fluoro-uridine
  modified_base 4: mod_base = OTHER; note = 2'-O-methyl-adenosine
  modified_base 5: mod_base = OTHER; note = 2'-fluoro-adenosine
  modified_base 6: mod_base = OTHER; note = 2'-O-methyl-cytidine
  modified_base 7: mod_base = OTHER; note = 2'-fluoro-uridine
  modified_base 8: mod_base = OTHER; note = 2'-O-methyl-cytidine
  modified_base 9: mod_base = OTHER; note = 2'-O-methyl-uridine
  modified_base 10: mod_base = OTHER; note = 2'-fluoro-guanosine
  modified_base 11: mod_base = OTHER; note = 2'-O-methyl-uridine
  modified_base 12: mod_base = OTHER; note = 2'-O-methyl-cytidine
  modified_base 13: mod_base = OTHER; note = 2'-O-methyl-cytidine
  modified_base 14: mod_base = OTHER; note = 2'-fluoro-adenosine
  modified_base 15: mod_base = OTHER; note = 2'-O-methyl-uridine
  modified_base 16: mod_base = OTHER; note = 2'-fluoro-cytidine
  modified_base 17: mod_base = OTHER; note = 2'-O-methyl-adenosine
  modified_base 18: mod_base = OTHER; note = 2'-O-methyl-cytidine
  modified_base 19: mod_base = OTHER; note = 2'-O-methyl-cytidine
  modified_base 20: mod_base = OTHER; note = 2'-O-methyl-adenosine with phosphorothioate linkage
  modified_base 21: mod_base = OTHER; note = 2'-O-methyl-uridine with phosphorothioate linkage
  modified_base 22: mod_base = OTHER; note = 2'-O-methyl-guanosine
tataactctgtccatcaccatg

SEQ ID NO: 565 - RNA, 22 nt, synthetic construct
  source 1..22: mol_type = other RNA
  modified_base 1: mod_base = OTHER; note = 2'-O-methyl-uridine with phosphorothioate linkage
  modified_base 2: mod_base = OTHER; note = 2'-fluoro-uridine with phosphorothioate linkage
  modified_base 3: mod_base = OTHER; note = 2'-fluoro-guanosine
  modified_base 4: mod_base = OTHER; note = 2'-O-methyl-uridine
  modified_base 5: mod_base = OTHER; note = 2'-fluoro-cytidine
  modified_base 6: mod_base = OTHER; note = 2'-O-methyl-adenosine
  modified_base 7: mod_base = OTHER; note = 2'-fluoro-uridine
  modified_base 8: mod_base = OTHER; note = 2'-O-methyl-adenosine
  modified_base 9: mod_base = OTHER; note = 2'-O-methyl-guanosine
  modified_base 10: mod_base = OTHER; note = 2'-fluoro-adenosine
  modified_base 11: mod_base = OTHER; note = 2'-O-methyl-uridine
  modified_base 12: mod_base = OTHER; note = 2'-O-methyl-guanosine
  modified_base 13: mod_base = OTHER; note = 2'-O-methyl-adenosine
  modified_base 14: mod_base = OTHER; note = 2'-fluoro-cytidine
  modified_base 15: mod_base = OTHER; note = 2'-O-methyl-cytidine
  modified_base 16: mod_base = OTHER; note = 2'-fluoro-adenosine
  modified_base 17: mod_base = OTHER; note = 2'-O-methyl-adenosine
  modified_base 18: mod_base = OTHER; note = 2'-O-methyl-guanosine
  modified_base 19: mod_base = OTHER; note = 2'-O-methyl-cytidine
  modified_base 20: mod_base = OTHER; note = 2'-O-methyl-uridine with phosphorothioate linkage
  modified_base 21: mod_base = OTHER; note = 2'-O-methyl-uridine with phosphorothioate linkage
  modified_base 22: mod_base = OTHER; note = 2'-O-methyl-guanosine
ttgtcatagatgaccaagcttg

SEQ ID NO: 566 - RNA, 22 nt, synthetic construct
  source 1..22: mol_type = other RNA
  modified_base 1: mod_base = OTHER; note = 2'-O-methyl-uridine with phosphorothioate linkage
  modified_base 2: mod_base = OTHER; note = 2'-fluoro-adenosine with phosphorothioate linkage
  modified_base 3: mod_base = OTHER; note = 2'-fluoro-adenosine
  modified_base 4: mod_base = OTHER; note = 2'-O-methyl-uridine
  modified_base 5: mod_base = OTHER; note = 2'-fluoro-guanosine
  modified_base 6: mod_base = OTHER; note = 2'-O-methyl-uridine
  modified_base 7: mod_base = OTHER; note = 2'-fluoro-guanosine
  modified_base 8: mod_base = OTHER; note = 2'-O-methyl-cytidine
  modified_base 9: mod_base = OTHER; note = 2'-O-methyl-cytidine
  modified_base 10: mod_base = OTHER; note = 2'-fluoro-uridine
  modified_base 11: mod_base = OTHER; note = 2'-O-methyl-cytidine
  modified_base 12: mod_base = OTHER; note = 2'-O-methyl-guanosine
  modified_base 13: mod_base = OTHER; note = 2'-O-methyl-adenosine
  modified_base 14: mod_base = OTHER; note = 2'-fluoro-uridine
  modified_base 15: mod_base = OTHER; note = 2'-O-methyl-adenosine
  modified_base 16: mod_base = OTHER; note = 2'-fluoro-adenosine
  modified_base 17: mod_base = OTHER; note = 2'-O-methyl-cytidine
  modified_base 18: mod_base = OTHER; note = 2'-O-methyl-uridine
  modified_base 19: mod_base = OTHER; note = 2'-O-methyl-cytidine
  modified_base 20: mod_base = OTHER; note = 2'-O-methyl-uridine with phosphorothioate linkage
  modified_base 21: mod_base = OTHER; note = 2'-O-methyl-guanosine with phosphorothioate linkage
  modified_base 22: mod_base = OTHER; note = 2'-O-methyl-guanosine
taatgtgcctcgataactctgg

SEQ ID NO: 567 - RNA, 22 nt, synthetic construct
  source 1..22: mol_type = other RNA
  modified_base 1: mod_base = OTHER; note = 2'-O-methyl-uridine with phosphorothioate linkage
  modified_base 2: mod_base = OTHER; note = 2'-fluoro-guanosine with phosphorothioate linkage
  modified_base 3: mod_base = OTHER; note = 2'-fluoro-adenosine
  modified_base 4: mod_base = OTHER; note = 2'-O-methyl-guanosine
  modified_base 5: mod_base = OTHER; note = 2'-fluoro-cytidine
  modified_base 6: mod_base = OTHER; note = 2'-O-methyl-adenosine
  modified_base 7: mod_base = OTHER; note = 2'-fluoro-uridine
  modified_base 8: mod_base = OTHER; note = 2'-O-methyl-uridine
  modified_base 9: mod_base = OTHER; note = 2'-O-methyl-guanosine
  modified_base 10: mod_base = OTHER; note = 2'-fluoro-uridine
  modified_base 11: mod_base = OTHER; note = 2'-O-methyl-guanosine
  modified_base 12: mod_base = OTHER; note = 2'-O-methyl-uridine
  modified_base 13: mod_base = OTHER; note = 2'-O-methyl-cytidine
  modified_base 14: mod_base = OTHER; note = 2'-fluoro-adenosine
  modified_base 15: mod_base = OTHER; note = 2'-O-methyl-guanosine
  modified_base 16: mod_base = OTHER; note = 2'-fluoro-guanosine
  modified_base 17: mod_base = OTHER; note = 2'-O-methyl-uridine
  modified_base 18: mod_base = OTHER; note = 2'-O-methyl-uridine
  modified_base 19: mod_base = OTHER; note = 2'-O-methyl-guanosine
  modified_base 20: mod_base = OTHER; note = 2'-O-methyl-cytidine with phosphorothioate linkage
  modified_base 21: mod_base = OTHER; note = 2'-O-methyl-adenosine with phosphorothioate linkage
  modified_base 22: mod_base = OTHER; note = 2'-O-methyl-guanosine
tgagcattgtgtcaggttgcag

SEQ ID NO: 568 - RNA, 22 nt, synthetic construct
  source 1..22: mol_type = other RNA
  modified_base 1: mod_base = OTHER; note = 2'-O-methyl-uridine with phosphorothioate linkage
  modified_base 2: mod_base = OTHER; note = 2'-fluoro-guanosine with phosphorothioate linkage
  modified_base 3: mod_base = OTHER; note = 2'-fluoro-adenosine
  modified_base 4: mod_base = OTHER; note = 2'-O-methyl-uridine
  modified_base 5: mod_base = OTHER; note = 2'-fluoro-guanosine
  modified_base 6: mod_base = OTHER; note = 2'-O-methyl-adenosine
  modified_base 7: mod_base = OTHER; note = 2'-fluoro-cytidine
  modified_base 8: mod_base = OTHER; note = 2'-O-methyl-cytidine
  modified_base 9: mod_base = OTHER; note = 2'-O-methyl-adenosine
  modified_base 10: mod_base = OTHER; note = 2'-fluoro-adenosine
  modified_base 11: mod_base = OTHER; note = 2'-O-methyl-guanosine
  modified_base 12: mod_base = OTHER; note = 2'-O-methyl-cytidine
  modified_base 13: mod_base = OTHER; note = 2'-O-methyl-uridine
  modified_base 14: mod_base = OTHER; note = 2'-fluoro-uridine
  modified_base 15: mod_base = OTHER; note = 2'-O-methyl-guanosine
  modified_base 16: mod_base = OTHER; note = 2'-fluoro-guanosine
  modified_base 17: mod_base = OTHER; note = 2'-O-methyl-cytidine
  modified_base 18: mod_base = OTHER; note = 2'-O-methyl-adenosine
  modified_base 19: mod_base = OTHER; note = 2'-O-methyl-adenosine
  modified_base 20: mod_base = OTHER; note = 2'-O-methyl-guanosine with phosphorothioate linkage
  modified_base 21: mod_base = OTHER; note = 2'-O-methyl-uridine with phosphorothioate linkage
  modified_base 22: mod_base = OTHER; note = 2'-O-methyl-uridine
tgatgaccaagcttggcaagtt

SEQ ID NO: 569 - RNA, 22 nt, synthetic construct
  source 1..22: mol_type = other RNA
  modified_base 1: mod_base = OTHER; note = 2'-O-methyl-uridine with phosphorothioate linkage
  modified_base 2: mod_base = OTHER; note = 2'-fluoro-adenosine with phosphorothioate linkage
  modified_base 3: mod_base = OTHER; note = 2'-fluoro-cytidine
  modified_base 4: mod_base = OTHER; note = 2'-O-methyl-cytidine
  modified_base 5: mod_base = OTHER; note = 2'-fluoro-adenosine
  modified_base 6: mod_base = OTHER; note = 2'-O-methyl-adenosine
  modified_base 7: mod_base = OTHER; note = 2'-fluoro-guanosine
  modified_base 8: mod_base = OTHER; note = 2'-O-methyl-cytidine
  modified_base 9: mod_base = OTHER; note = 2'-O-methyl-uridine
  modified_base 10: mod_base = OTHER; note = 2'-fluoro-uridine
  modified_base 11: mod_base = OTHER; note = 2'-O-methyl-guanosine
  modified_base 12: mod_base = OTHER; note = 2'-O-methyl-guanosine
  modified_base 13: mod_base = OTHER; note = 2'-O-methyl-cytidine
  modified_base 14: mod_base = OTHER; note = 2'-fluoro-adenosine
  modified_base 15: mod_base = OTHER; note = 2'-O-methyl-adenosine
  modified_base 16: mod_base = OTHER; note = 2'-fluoro-guanosine
  modified_base 17: mod_base = OTHER; note = 2'-O-methyl-uridine
  modified_base 18: mod_base = OTHER; note = 2'-O-methyl-uridine
  modified_base 19: mod_base = OTHER; note = 2'-O-methyl-cytidine
  modified_base 20: mod_base = OTHER; note = 2'-O-methyl-uridine with phosphorothioate linkage
  modified_base 21: mod_base = OTHER; note = 2'-O-methyl-uridine with phosphorothioate linkage
  modified_base 22: mod_base = OTHER; note = 2'-O-methyl-cytidine
taccaagcttggcaagttcttc

SEQ ID NO: 570 - RNA, 22 nt, synthetic construct
  source 1..22: mol_type = other RNA
  modified_base 1: mod_base = OTHER; note = 2'-O-methyl-uridine with phosphorothioate linkage
  modified_base 2: mod_base = OTHER; note = 2'-fluoro-adenosine with phosphorothioate linkage
  modified_base 3: mod_base = OTHER; note = 2'-fluoro-guanosine
  modified_base 4: mod_base = OTHER; note = 2'-O-methyl-uridine
  modified_base 5: mod_base = OTHER; note = 2'-fluoro-guanosine
  modified_base 6: mod_base = OTHER; note = 2'-O-methyl-uridine
  modified_base 7: mod_base = OTHER; note = 2'-fluoro-guanosine
  modified_base 8: mod_base = OTHER; note = 2'-O-methyl-guanosine
  modified_base 9: mod_base = OTHER; note = 2'-O-methyl-uridine
  modified_base 10: mod_base = OTHER; note = 2'-fluoro-guanosine
  modified_base 11: mod_base = OTHER; note = 2'-O-methyl-uridine
  modified_base 12: mod_base = OTHER; note = 2'-O-methyl-cytidine
  modified_base 13: mod_base = OTHER; note = 2'-O-methyl-adenosine
  modified_base 14: mod_base = OTHER; note = 2'-fluoro-uridine
  modified_base 15: mod_base = OTHER; note = 2'-O-methyl-adenosine
  modified_base 16: mod_base = OTHER; note = 2'-fluoro-guanosine
  modified_base 17: mod_base = OTHER; note = 2'-O-methyl-adenosine
  modified_base 18: mod_base = OTHER; note = 2'-O-methyl-uridine
  modified_base 19: mod_base = OTHER; note = 2'-O-methyl-guanosine
  modified_base 20: mod_base = OTHER; note = 2'-O-methyl-adenosine with phosphorothioate linkage
  modified_base 21: mod_base = OTHER; note = 2'-O-methyl-cytidine with phosphorothioate linkage
  modified_base 22: mod_base = OTHER; note = 2'-O-methyl-cytidine
tagtgtggtgtcatagatgacc

SEQ ID NO: 571 - RNA, 22 nt, synthetic construct
  source 1..22: mol_type = other RNA
  modified_base 1: mod_base = OTHER; note = 2'-O-methyl-uridine with phosphorothioate linkage
  modified_base 2: mod_base = OTHER; note = 2'-fluoro-cytidine with phosphorothioate linkage
  modified_base 3: mod_base = OTHER; note = 2'-fluoro-uridine
  modified_base 4: mod_base = OTHER; note = 2'-O-methyl-cytidine
  modified_base 5: mod_base = OTHER; note = 2'-fluoro-uridine
  modified_base 6: mod_base = OTHER; note = 2'-O-methyl-guanosine
  modified_base 7: mod_base = OTHER; note = 2'-fluoro-uridine
  modified_base 8: mod_base = OTHER; note = 2'-O-methyl-cytidine
  modified_base 9: mod_base = OTHER; note = 2'-O-methyl-cytidine
  modified_base 10: mod_base = OTHER; note = 2'-fluoro-adenosine
  modified_base 11: mod_base = OTHER; note = 2'-O-methyl-uridine
  modified_base 12: mod_base = OTHER; note = 2'-O-methyl-cytidine
  modified_base 13: mod_base = OTHER; note = 2'-O-methyl-adenosine
  modified_base 14: mod_base = OTHER; note = 2'-fluoro-cytidine
  modified_base 15: mod_base = OTHER; note = 2'-O-methyl-cytidine
  modified_base 16: mod_base = OTHER; note = 2'-fluoro-adenosine
  modified_base 17: mod_base = OTHER; note = 2'-O-methyl-uridine
  modified_base 18: mod_base = OTHER; note = 2'-O-methyl-guanosine
  modified_base 19: mod_base = OTHER; note = 2'-O-methyl-guanosine
  modified_base 20: mod_base = OTHER; note = 2'-O-methyl-uridine with phosphorothioate linkage
  modified_base 21: mod_base = OTHER; note = 2'-O-methyl-adenosine with phosphorothioate linkage
  modified_base 22: mod_base = OTHER; note = 2'-O-methyl-guanosine
tctctgtccatcaccatggtag

SEQ ID NO: 572 - RNA, 22 nt, synthetic construct
  source 1..22: mol_type = other RNA
  modified_base 1: mod_base = OTHER; note = 2'-O-methyl-uridine with phosphorothioate linkage
  modified_base 2: mod_base = OTHER; note = 2'-fluoro-guanosine with phosphorothioate linkage
  modified_base 3: mod_base = OTHER; note = 2'-fluoro-uridine
  modified_base 4: mod_base = OTHER; note = 2'-O-methyl-guanosine
  modified_base 5: mod_base = OTHER; note = 2'-fluoro-cytidine
  modified_base 6: mod_base = OTHER; note = 2'-O-methyl-cytidine
  modified_base 7: mod_base = OTHER; note = 2'-fluoro-uridine
  modified_base 8: mod_base = OTHER; note = 2'-O-methyl-cytidine
  modified_base 9: mod_base = OTHER; note = 2'-O-methyl-guanosine
  modified_base 10: mod_base = OTHER; note = 2'-fluoro-adenosine
  modified_base 11: mod_base = OTHER; note = 2'-O-methyl-uridine
  modified_base 12: mod_base = OTHER; note = 2'-O-methyl-adenosine
  modified_base 13: mod_base = OTHER; note = 2'-O-methyl-adenosine
  modified_base 14: mod_base = OTHER; note = 2'-fluoro-cytidine
  modified_base 15: mod_base = OTHER; note = 2'-O-methyl-uridine
  modified_base 16: mod_base = OTHER; note = 2'-fluoro-cytidine
  modified_base 17: mod_base = OTHER; note = 2'-O-methyl-uridine
  modified_base 18: mod_base = OTHER; note = 2'-O-methyl-guanosine
  modified_base 19: mod_base = OTHER; note = 2'-O-methyl-uridine
  modified_base 20: mod_base = OTHER; note = 2'-O-methyl-cytidine with phosphorothioate linkage
  modified_base 21: mod_base = OTHER; note = 2'-O-methyl-cytidine with phosphorothioate linkage
  modified_base 22: mod_base = OTHER; note = 2'-O-methyl-adenosine
tgtgcctcgataactctgtcca

SEQ ID NO: 573 - RNA, 20 nt, synthetic construct
  source 1..20: mol_type = other RNA
  modified_base 1: mod_base = OTHER; note = 2'-O-methyl-uridine with phosphorothioate linkage
  modified_base 2: mod_base = OTHER; note = 2'-O-methyl-uridine with phosphorothioate linkage
  modified_base 3: mod_base = OTHER; note = 2'-O-methyl-guanosine
  modified_base 4: mod_base = OTHER; note = 2'-O-methyl-guanosine
  modified_base 5: mod_base = OTHER; note = 2'-O-methyl-uridine
  modified_base 6: mod_base = OTHER; note = 2'-fluoro-cytidine
  modified_base 7: mod_base = OTHER; note = 2'-O-methyl-adenosine
  modified_base 8: mod_base = OTHER; note = 2'-fluoro-uridine
  modified_base 9: mod_base = OTHER; note = 2'-fluoro-cytidine
  modified_base 10: mod_base = OTHER; note = 2'-fluoro-uridine
  modified_base 11: mod_base = OTHER; note = 2'-fluoro-adenosine
  modified_base 12: mod_base = OTHER; note = 2'-O-methyl-uridine
  modified_base 13: mod_base = OTHER; note = 2'-O-methyl-guanosine
  modified_base 14: mod_base = OTHER; note = 2'-O-methyl-adenosine
  modified_base 15: mod_base = OTHER; note = 2'-O-methyl-cytidine
  modified_base 16: mod_base = OTHER; note = 2'-O-methyl-adenosine
  modified_base 17: mod_base = OTHER; note = 2'-O-methyl-cytidine
  modified_base 18: mod_base = OTHER; note = 2'-O-methyl-cytidine with phosphorothioate linkage
  modified_base 19: mod_base = OTHER; note = 2'-O-methyl-adenosine with phosphorothioate linkage
  modified_base 20: mod_base = OTHER; note = 2'-O-methyl-adenosine
  modified_base 20: mod_base = OTHER; note = Nucleotide conjugated to 3 iterations of (2R,3R,4R,5S)-5-(3-(5-(((2R,3R,4R,5R,6R)- 3-acetamido-4,5-dihydroxy-6-(hydroxymethyl)tetrahydro-2H-py ran-2-yl)oxy) pentanamido)propyl)-2-((hydroxyl)methyl)-4-methoxytetrahydr ofuran-3-oxyl
ttggtcatctatgacaccaa

SEQ ID NO: 574 - RNA, 20 nt, synthetic construct
  source 1..20: mol_type = other RNA
  modified_base 1: mod_base = OTHER; note = 2'-O-methyl-adenosine with phosphorothioate linkage
  modified_base 2: mod_base = OTHER; note = 2'-O-methyl-cytidine with phosphorothioate linkage
  modified_base 3: mod_base = OTHER; note = 2'-O-methyl-uridine
  modified_base 4: mod_base = OTHER; note = 2'-O-methyl-adenosine
  modified_base 5: mod_base = OTHER; note = 2'-O-methyl-cytidine
  modified_base 6: mod_base = OTHER; note = 2'-fluoro-cytidine
  modified_base 7: mod_base = OTHER; note = 2'-O-methyl-cytidine
  modified_base 8: mod_base = OTHER; note = 2'-fluoro-adenosine
  modified_base 9: mod_base = OTHER; note = 2'-fluoro-adenosine
  modified_base 10: mod_base = OTHER; note = 2'-fluoro-adenosine
  modified_base 11: mod_base = OTHER; note = 2'-fluoro-uridine
  modified_base 12: mod_base = OTHER; note = 2'-O-methyl-guanosine
  modified_base 13: mod_base = OTHER; note = 2'-O-methyl-cytidine
  modified_base 14: mod_base = OTHER; note = 2'-O-methyl-uridine
  modified_base 15: mod_base = OTHER; note = 2'-O-methyl-guanosine
  modified_base 16: mod_base = OTHER; note = 2'-O-methyl-guanosine
  modified_base 17: mod_base = OTHER; note = 2'-O-methyl-cytidine
  modified_base 18: mod_base = OTHER; note = 2'-O-methyl-uridine with phosphorothioate linkage
  modified_base 19: mod_base = OTHER; note = 2'-O-methyl-uridine with phosphorothioate linkage
  modified_base 20: mod_base = OTHER; note = 2'-O-methyl-adenosine
  modified_base 20: mod_base = OTHER; note = Nucleotide conjugated to 3 iterations of (2R,3R,4R,5S)-5-(3-(5-(((2R,3R,4R,5R,6R)- 3-acetamido-4,5-dihydroxy-6-(hydroxymethyl)tetrahydro-2H-py ran-2-yl)oxy) pentanamido)propyl)-2-((hydroxyl)methyl)-4-methoxytetrahydr ofuran-3-oxyl
actacccaaatgctggctta

SEQ ID NO: 575 - RNA, 20 nt, synthetic construct
  source 1..20: mol_type = other RNA
  modified_base 1: mod_base = OTHER; note = 2'-O-methyl-adenosine with phosphorothioate linkage
  modified_base 2: mod_base = OTHER; note = 2'-O-methyl-guanosine with phosphorothioate linkage
  modified_base 3: mod_base = OTHER; note = 2'-O-methyl-guanosine
  modified_base 4: mod_base = OTHER; note = 2'-O-methyl-adenosine
  modified_base 5: mod_base = OTHER; note = 2'-O-methyl-adenosine
  modified_base 6: mod_base = OTHER; note = 2'-fluoro-guanosine
  modified_base 7: mod_base = OTHER; note = 2'-O-methyl-guanosine
  modified_base 8: mod_base = OTHER; note = 2'-fluoro-adenosine
  modified_base 9: mod_base = OTHER; note = 2'-fluoro-cytidine
  modified_base 10: mod_base = OTHER; note = 2'-fluoro-adenosine
  modified_base 11: mod_base = OTHER; note = 2'-fluoro-uridine
  modified_base 12: mod_base = OTHER; note = 2'-O-methyl-guanosine
  modified_base 13: mod_base = OTHER; note = 2'-O-methyl-uridine
  modified_base 14: mod_base = OTHER; note = 2'-O-methyl-cytidine
  modified_base 15: mod_base = OTHER; note = 2'-O-methyl-adenosine
  modified_base 16: mod_base = OTHER; note = 2'-O-methyl-guanosine
  modified_base 17: mod_base = OTHER; note = 2'-O-methyl-uridine
  modified_base 18: mod_base = OTHER; note = 2'-O-methyl-cytidine with phosphorothioate linkage
  modified_base 19: mod_base = OTHER; note = 2'-O-methyl-uridine with phosphorothioate linkage
  modified_base 20: mod_base = OTHER; note = 2'-O-methyl-adenosine
  modified_base 20: mod_base = OTHER; note = Nucleotide conjugated to 3 iterations of (2R,3R,4R,5S)-5-(3-(5-(((2R,3R,4R,5R,6R)- 3-acetamido-4,5-dihydroxy-6-(hydroxymethyl)tetrahydro-2H-py ran-2-yl)oxy) pentanamido)propyl)-2-((hydroxyl)methyl)-4-methoxytetrahydr ofuran-3-oxyl
aggaaggacatgtcagtcta

SEQ ID NO: 576 - RNA, 20 nt, synthetic construct
  source 1..20: mol_type = other RNA
  modified_base 1: mod_base = OTHER; note = 2'-O-methyl-adenosine with phosphorothioate linkage
  modified_base 2: mod_base = OTHER; note = 2'-O-methyl-uridine with phosphorothioate linkage
  modified_base 3: mod_base = OTHER; note = 2'-O-methyl-cytidine
  modified_base 4: mod_base = OTHER; note = 2'-O-methyl-adenosine
  modified_base 5: mod_base = OTHER; note = 2'-O-methyl-adenosine
  modified_base 6: mod_base = OTHER; note = 2'-fluoro-guanosine
  modified_base 7: mod_base = OTHER; note = 2'-O-methyl-uridine
  modified_base 8: mod_base = OTHER; note = 2'-fluoro-guanosine
  modified_base 9: mod_base = OTHER; note = 2'-fluoro-uridine
  modified_base 10: mod_base = OTHER; note = 2'-fluoro-cytidine
  modified_base 11: mod_base = OTHER; note = 2'-fluoro-cytidine
  modified_base 12: mod_base = OTHER; note = 2'-O-methyl-uridine
  modified_base 13: mod_base = OTHER; note = 2'-O-methyl-uridine
  modified_base 14: mod_base = OTHER; note = 2'-O-methyl-guanosine
  modified_base 15: mod_base = OTHER; note = 2'-O-methyl-cytidine
  modified_base 16: mod_base = OTHER; note = 2'-O-methyl-adenosine
  modified_base 17: mod_base = OTHER; note = 2'-O-methyl-adenosine
  modified_base 18: mod_base = OTHER; note = 2'-O-methyl-cytidine with phosphorothioate linkage
  modified_base 19: mod_base = OTHER; note = 2'-O-methyl-uridine with phosphorothioate linkage
  modified_base 20: mod_base = OTHER; note = 2'-O-methyl-adenosine
  modified_base 20: mod_base = OTHER; note = Nucleotide conjugated to 3 iterations of (2R,3R,4R,5S)-5-(3-(5-(((2R,3R,4R,5R,6R)- 3-acetamido-4,5-dihydroxy-6-(hydroxymethyl)tetrahydro-2H-py ran-2-yl)oxy) pentanamido)propyl)-2-((hydroxyl)methyl)-4-methoxytetrahydr ofuran-3-oxyl
atcaagtgtccttgcaacta

SEQ ID NO: 577 - RNA, 20 nt, synthetic construct
  source 1..20: mol_type = other RNA
  modified_base 1: mod_base = OTHER; note = 2'-O-methyl-guanosine with phosphorothioate linkage
  modified_base 2: mod_base = OTHER; note = 2'-O-methyl-uridine with phosphorothioate linkage
  modified_base 3: mod_base = OTHER; note = 2'-O-methyl-guanosine
  modified_base 4: mod_base = OTHER; note = 2'-O-methyl-adenosine
  modified_base 5: mod_base = OTHER; note = 2'-O-methyl-uridine
  modified_base 6: mod_base = OTHER; note = 2'-fluoro-guanosine
  modified_base 7: mod_base = OTHER; note = 2'-O-methyl-guanosine
  modified_base 8: mod_base = OTHER; note = 2'-fluoro-adenosine
  modified_base 9: mod_base = OTHER; note = 2'-fluoro-cytidine
  modified_base 10: mod_base = OTHER; note = 2'-fluoro-adenosine
  modified_base 11: mod_base = OTHER; note = 2'-fluoro-guanosine
  modified_base 12: mod_base = OTHER; note = 2'-O-methyl-adenosine
  modified_base 13: mod_base = OTHER; note = 2'-O-methyl-guanosine
  modified_base 14: mod_base = OTHER; note = 2'-O-methyl-uridine
  modified_base 15: mod_base = OTHER; note = 2'-O-methyl-uridine
  modified_base 16: mod_base = OTHER; note = 2'-O-methyl-adenosine
  modified_base 17: mod_base = OTHER; note = 2'-O-methyl-uridine
  modified_base 18: mod_base = OTHER; note = 2'-O-methyl-cytidine with phosphorothioate linkage
  modified_base 19: mod_base = OTHER; note = 2'-O-methyl-guanosine with phosphorothioate linkage
  modified_base 20: mod_base = OTHER; note = 2'-O-methyl-adenosine
  modified_base 20: mod_base = OTHER; note = Nucleotide conjugated to 3 iterations of (2R,3R,4R,5S)-5-(3-(5-(((2R,3R,4R,5R,6R)- 3-acetamido-4,5-dihydroxy-6-(hydroxymethyl)tetrahydro-2H-py ran-2-yl)oxy) pentanamido)propyl)-2-((hydroxyl)methyl)-4-methoxytetrahydr ofuran-3-oxyl
gtgatggacagagttatcga

SEQ ID NO: 578 - RNA, 20 nt, synthetic construct
  source 1..20: mol_type = other RNA
  modified_base 1: mod_base = OTHER; note = 2'-O-methyl-adenosine with phosphorothioate linkage
  modified_base 2: mod_base = OTHER; note = 2'-O-methyl-uridine with phosphorothioate linkage
  modified_base 3: mod_base = OTHER; note = 2'-O-methyl-guanosine
  modified_base 4: mod_base = OTHER; note = 2'-O-methyl-guanosine
  modified_base 5: mod_base = OTHER; note = 2'-O-methyl-uridine
  modified_base 6: mod_base = OTHER; note = 2'-fluoro-guanosine
  modified_base 7: mod_base = OTHER; note = 2'-O-methyl-adenosine
  modified_base 8: mod_base = OTHER; note = 2'-fluoro-uridine
  modified_base 9: mod_base = OTHER; note = 2'-fluoro-guanosine
  modified_base 10: mod_base = OTHER; note = 2'-fluoro-guanosine
  modified_base 11: mod_base = OTHER; note = 2'-fluoro-adenosine
  modified_base 12: mod_base = OTHER; note = 2'-O-methyl-cytidine
  modified_base 13: mod_base = OTHER; note = 2'-O-methyl-adenosine
  modified_base 14: mod_base = OTHER; note = 2'-O-methyl-guanosine
  modified_base 15: mod_base = OTHER; note = 2'-O-methyl-adenosine
  modified_base 16: mod_base = OTHER; note = 2'-O-methyl-guanosine
  modified_base 17: mod_base = OTHER; note = 2'-O-methyl-uridine
  modified_base 18: mod_base = OTHER; note = 2'-O-methyl-uridine with phosphorothioate linkage
  modified_base 19: mod_base = OTHER; note = 2'-O-methyl-adenosine with phosphorothioate linkage
  modified_base 20: mod_base = OTHER; note = 2'-O-methyl-adenosine
  modified_base 20: mod_base = OTHER; note = Nucleotide conjugated to 3 iterations of (2R,3R,4R,5S)-5-(3-(5-(((2R,3R,4R,5R,6R)- 3-acetamido-4,5-dihydroxy-6-(hydroxymethyl)tetrahydro-2H-py ran-2-yl)oxy) pentanamido)propyl)-2-((hydroxyl)methyl)-4-methoxytetrahydr ofuran-3-oxyl
atggtgatggacagagttaa

SEQ ID NO: 579 - RNA, 20 nt, synthetic construct
  source 1..20: mol_type = other RNA
  modified_base 1: mod_base = OTHER; note = 2'-O-methyl-cytidine with phosphorothioate linkage
  modified_base 2: mod_base = OTHER; note = 2'-O-methyl-adenosine with phosphorothioate linkage
  modified_base 3: mod_base = OTHER; note = 2'-O-methyl-adenosine
  modified_base 4: mod_base = OTHER; note = 2'-O-methyl-cytidine
  modified_base 5: mod_base = OTHER; note = 2'-O-methyl-cytidine
  modified_base 6: mod_base = OTHER; note = 2'-fluoro-uridine
  modified_base 7: mod_base = OTHER; note = 2'-O-methyl-guanosine
  modified_base 8: mod_base = OTHER; note = 2'-fluoro-adenosine
  modified_base 9: mod_base = OTHER; note = 2'-fluoro-cytidine
  modified_base 10: mod_base = OTHER; note = 2'-fluoro-adenosine
  modified_base 11: mod_base = OTHER; note = 2'-fluoro-cytidine
  modified_base 12: mod_base = OTHER; note = 2'-O-methyl-adenosine
  modified_base 13: mod_base = OTHER; note = 2'-O-methyl-adenosine
  modified_base 14: mod_base = OTHER; note = 2'-O-methyl-uridine
  modified_base 15: mod_base = OTHER; note = 2'-O-methyl-guanosine
  modified_base 16: mod_base = OTHER; note = 2'-O-methyl-cytidine
  modified_base 17: mod_base = OTHER; note = 2'-O-methyl-uridine
  modified_base 18: mod_base = OTHER; note = 2'-O-methyl-cytidine with phosphorothioate linkage
  modified_base 19: mod_base = OTHER; note = 2'-O-methyl-adenosine with phosphorothioate linkage
  modified_base 20: mod_base = OTHER; note = 2'-O-methyl-adenosine
  modified_base 20: mod_base = OTHER; note = Nucleotide conjugated to 3 iterations of (2R,3R,4R,5S)-5-(3-(5-(((2R,3R,4R,5R,6R)- 3-acetamido-4,5-dihydroxy-6-(hydroxymethyl)tetrahydro-2H-py ran-2-yl)oxy) pentanamido)propyl)-2-((hydroxyl)methyl)-4-methoxytetrahydr ofuran-3-oxyl
caacctgacacaatgctcaa

SEQ ID NO: 580 - RNA, 20 nt, synthetic construct
  source 1..20: mol_type = other RNA
  modified_base 1: mod_base = OTHER; note = 2'-O-methyl-guanosine with phosphorothioate linkage
  modified_base 2: mod_base = OTHER; note = 2'-O-methyl-guanosine with phosphorothioate linkage
  modified_base 3: mod_base = OTHER; note = 2'-O-methyl-uridine
  modified_base 4: mod_base = OTHER; note = 2'-O-methyl-guanosine
  modified_base 5: mod_base = OTHER; note = 2'-O-methyl-adenosine
  modified_base 6: mod_base = OTHER; note = 2'-fluoro-uridine
  modified_base 7: mod_base = OTHER; note = 2'-O-methyl-guanosine
  modified_base 8: mod_base = OTHER; note = 2'-fluoro-guanosine
  modified_base 9: mod_base = OTHER; note = 2'-fluoro-adenosine
  modified_base 10: mod_base = OTHER; note = 2'-fluoro-cytidine
  modified_base 11: mod_base = OTHER; note = 2'-fluoro-adenosine
  modified_base 12: mod_base = OTHER; note = 2'-O-methyl-guanosine
  modified_base 13: mod_base = OTHER; note = 2'-O-methyl-adenosine
  modified_base 14: mod_base = OTHER; note = 2'-O-methyl-guanosine
  modified_base 15: mod_base = OTHER; note = 2'-O-methyl-uridine
  modified_base 16: mod_base = OTHER; note = 2'-O-methyl-uridine
  modified_base 17: mod_base = OTHER; note = 2'-O-methyl-adenosine
  modified_base 18: mod_base = OTHER; note = 2'-O-methyl-uridine with phosphorothioate linkage
  modified_base 19: mod_base = OTHER; note = 2'-O-methyl-cytidine with phosphorothioate linkage
  modified_base 20: mod_base = OTHER; note = 2'-O-methyl-adenosine
  modified_base 20: mod_base = OTHER; note = Nucleotide conjugated to 3 iterations of (2R,3R,4R,5S)-5-(3-(5-(((2R,3R,4R,5R,6R)- 3-acetamido-4,5-dihydroxy-6-(hydroxymethyl)tetrahydro-2H-py ran-2-yl)oxy) pentanamido)propyl)-2-((hydroxyl)methyl)-4-methoxytetrahydr ofuran-3-oxyl
ggtgatggacagagttatca

SEQ ID NO: 581 - RNA, 20 nt, synthetic construct
  source 1..20: mol_type = other RNA
  modified_base 1: mod_base = OTHER; note = 2'-O-methyl-cytidine with phosphorothioate linkage
  modified_base 2: mod_base = OTHER; note = 2'-O-methyl-guanosine with phosphorothioate linkage
  modified_base 3: mod_base = OTHER; note = 2'-O-methyl-guanosine
  modified_base 4: mod_base = OTHER; note = 2'-O-methyl-uridine
  modified_base 5: mod_base = OTHER; note = 2'-O-methyl-adenosine
  modified_base 6: mod_base = OTHER; note = 2'-fluoro-adenosine
  modified_base 7: mod_base = OTHER; note = 2'-O-methyl-uridine
  modified_base 8: mod_base = OTHER; note = 2'-fluoro-guanosine
  modified_base 9: mod_base = OTHER; note = 2'-fluoro-guanosine
  modified_base 10: mod_base = OTHER; note = 2'-fluoro-adenosine
  modified_base 11: mod_base = OTHER; note = 2'-fluoro-cytidine
  modified_base 12: mod_base = OTHER; note = 2'-O-methyl-adenosine
  modified_base 13: mod_base = OTHER; note = 2'-O-methyl-guanosine
  modified_base 14: mod_base = OTHER; note = 2'-O-methyl-adenosine
  modified_base 15: mod_base = OTHER; note = 2'-O-methyl-guanosine
  modified_base 16: mod_base = OTHER; note = 2'-O-methyl-uridine
  modified_base 17: mod_base = OTHER; note = 2'-O-methyl-uridine
  modified_base 18: mod_base = OTHER; note = 2'-O-methyl-adenosine with phosphorothioate linkage
  modified_base 19: mod_base = OTHER; note = 2'-O-methyl-uridine with phosphorothioate linkage
  modified_base 20: mod_base = OTHER; note = 2'-O-methyl-adenosine
  modified_base 20: mod_base = OTHER; note = Nucleotide conjugated to 3 iterations of (2R,3R,4R,5S)-5-(3-(5-(((2R,3R,4R,5R,6R)- 3-acetamido-4,5-dihydroxy-6-(hydroxymethyl)tetrahydro-2H-py ran-2-yl)oxy) pentanamido)propyl)-2-((hydroxyl)methyl)-4-methoxytetrahydr ofuran-3-oxyl
cggtaatggacagagttata

SEQ ID NO: 582 - RNA, 20 nt, synthetic construct
  source 1..20: mol_type = other RNA
  modified_base 1: mod_base = OTHER; note = 2'-O-methyl-cytidine with phosphorothioate linkage
  modified_base 2: mod_base = OTHER; note = 2'-O-methyl-adenosine with phosphorothioate linkage
  modified_base 3: mod_base = OTHER; note = 2'-O-methyl-adenosine
  modified_base 4: mod_base = OTHER; note = 2'-O-methyl-guanosine
  modified_base 5: mod_base = OTHER; note = 2'-O-methyl-cytidine
  modified_base 6: mod_base = OTHER; note = 2'-fluoro-uridine
  modified_base 7: mod_base = OTHER; note = 2'-O-methyl-uridine
  modified_base 8: mod_base = OTHER; note = 2'-fluoro-guanosine
  modified_base 9: mod_base = OTHER; note = 2'-fluoro-guanosine
  modified_base 10: mod_base = OTHER; note = 2'-fluoro-uridine
  modified_base 11: mod_base = OTHER; note = 2'-fluoro-cytidine
  modified_base 12: mod_base = OTHER; note = 2'-O-methyl-adenosine
  modified_base 13: mod_base = OTHER; note = 2'-O-methyl-uridine
  modified_base 14: mod_base = OTHER; note = 2'-O-methyl-cytidine
  modified_base 15: mod_base = OTHER; note = 2'-O-methyl-uridine
  modified_base 16: mod_base = OTHER; note = 2'-O-methyl-adenosine
  modified_base 17: mod_base = OTHER; note = 2'-O-methyl-uridine
  modified_base 18: mod_base = OTHER; note = 2'-O-methyl-guanosine with phosphorothioate linkage
  modified_base 19: mod_base = OTHER; note = 2'-O-methyl-adenosine with phosphorothioate linkage
  modified_base 20: mod_base = OTHER; note = 2'-O-methyl-adenosine
  modified_base 20: mod_base = OTHER; note = Nucleotide conjugated to 3 iterations of (2R,3R,4R,5S)-5-(3-(5-(((2R,3R,4R,5R,6R)- 3-acetamido-4,5-dihydroxy-6-(hydroxymethyl)tetrahydro-2H-py ran-2-yl)oxy) pentanamido)propyl)-2-((hydroxyl)methyl)-4-methoxytetrahydr ofuran-3-oxyl
caagcttggtcatctatgaa

SEQ ID NO: 583 - RNA, 20 nt, synthetic construct
  source 1..20: mol_type = other RNA
  modified_base 1: mod_base = OTHER; note = 2'-O-methyl-uridine with phosphorothioate linkage
  modified_base 2: mod_base = OTHER; note = 2'-O-methyl-guanosine with phosphorothioate linkage
  modified_base 3: mod_base = OTHER; note = 2'-O-methyl-guanosine
  modified_base 4: mod_base = OTHER; note = 2'-O-methyl-uridine
  modified_base 5: mod_base = OTHER; note = 2'-O-methyl-guanosine
  modified_base 6: mod_base = OTHER; note = 2'-fluoro-adenosine
  modified_base 7: mod_base = OTHER; note = 2'-O-methyl-uridine
  modified_base 8: mod_base = OTHER; note = 2'-fluoro-guanosine
  modified_base 9: mod_base = OTHER; note = 2'-fluoro-guanosine
  modified_base 10: mod_base = OTHER; note = 2'-fluoro-adenosine
  modified_base 11: mod_base = OTHER; note = 2'-fluoro-cytidine
  modified_base 12: mod_base = OTHER; note = 2'-O-methyl-adenosine
  modified_base 13: mod_base = OTHER; note = 2'-O-methyl-guanosine
  modified_base 14: mod_base = OTHER; note = 2'-O-methyl-adenosine
  modified_base 15: mod_base = OTHER; note = 2'-O-methyl-guanosine
  modified_base 16: mod_base = OTHER; note = 2'-O-methyl-uridine
  modified_base 17: mod_base = OTHER; note = 2'-O-methyl-uridine
  modified_base 18: mod_base = OTHER; note = 2'-O-methyl-adenosine with phosphorothioate linkage
  modified_base 19: mod_base = OTHER; note = 2'-O-methyl-uridine with phosphorothioate linkage
  modified_base 20: mod_base = OTHER; note = 2'-O-methyl-adenosine
  modified_base 20: mod_base = OTHER; note = Nucleotide conjugated to 3 iterations of (2R,3R,4R,5S)-5-(3-(5-(((2R,3R,4R,5R,6R)- 3-acetamido-4,5-dihydroxy-6-(hydroxymethyl)tetrahydro-2H-py ran-2-yl)oxy) pentanamido)propyl)-2-((hydroxyl)methyl)-4-methoxytetrahydr ofuran-3-oxyl
tggtgatggacagagttata

SEQ ID NO: 584 - RNA, 20 nt, synthetic construct
  source 1..20: mol_type = other RNA
  modified_base 1: mod_base = OTHER; note = 2'-O-methyl-adenosine with phosphorothioate linkage
  modified_base 2: mod_base = OTHER; note = 2'-O-methyl-guanosine with phosphorothioate linkage
  modified_base 3: mod_base = OTHER; note = 2'-O-methyl-cytidine
  modified_base 4: mod_base = OTHER; note = 2'-O-methyl-uridine
  modified_base 5: mod_base = OTHER; note = 2'-O-methyl-uridine
  modified_base 6: mod_base = OTHER; note = 2'-fluoro-guanosine
  modified_base 7: mod_base = OTHER; note = 2'-O-methyl-guanosine
  modified_base 8: mod_base = OTHER; note = 2'-fluoro-uridine
  modified_base 9: mod_base = OTHER; note = 2'-fluoro-cytidine
  modified_base 10: mod_base = OTHER; note = 2'-fluoro-adenosine
  modified_base 11: mod_base = OTHER; note = 2'-fluoro-uridine
  modified_base 12: mod_base = OTHER; note = 2'-O-methyl-cytidine
  modified_base 13: mod_base = OTHER; note = 2'-O-methyl-uridine
  modified_base 14: mod_base = OTHER; note = 2'-O-methyl-adenosine
  modified_base 15: mod_base = OTHER; note = 2'-O-methyl-uridine
  modified_base 16: mod_base = OTHER; note = 2'-O-methyl-guanosine
  modified_base 17: mod_base = OTHER; note = 2'-O-methyl-adenosine
  modified_base 18: mod_base = OTHER; note = 2'-O-methyl-cytidine with phosphorothioate linkage
  modified_base 19: mod_base = OTHER; note = 2'-O-methyl-adenosine with phosphorothioate linkage
  modified_base 20: mod_base = OTHER; note = 2'-O-methyl-adenosine
  modified_base 20: mod_base = OTHER; note = Nucleotide conjugated to 3 iterations of (2R,3R,4R,5S)-5-(3-(5-(((2R,3R,4R,5R,6R)- 3-acetamido-4,5-dihydroxy-6-(hydroxymethyl)tetrahydro-2H-py ran-2-yl)oxy) pentanamido)propyl)-2-((hydroxyl)methyl)-4-methoxytetrahydr ofuran-3-oxyl
agcttggtcatctatgacaa

SEQ ID NO: 585 - RNA, 20 nt, synthetic construct
  source 1..20: mol_type = other RNA
  modified_base 1: mod_base = OTHER; note = 2'-O-methyl-adenosine with phosphorothioate linkage
  modified_base 2: mod_base = OTHER; note = 2'-O-methyl-guanosine with phosphorothioate linkage
  modified_base 3: mod_base = OTHER; note = 2'-O-methyl-adenosine
  modified_base 4: mod_base = OTHER; note = 2'-O-methyl-guanosine
  modified_base 5: mod_base = OTHER; note = 2'-O-methyl-uridine
  modified_base 6: mod_base = OTHER; note = 2'-fluoro-uridine
  modified_base 7: mod_base = OTHER; note = 2'-O-methyl-adenosine
  modified_base 8: mod_base = OTHER; note = 2'-fluoro-uridine
  modified_base 9: mod_base = OTHER; note = 2'-fluoro-cytidine
  modified_base 10: mod_base = OTHER; note = 2'-fluoro-guanosine
  modified_base 11: mod_base = OTHER; note = 2'-fluoro-adenosine
  modified_base 12: mod_base = OTHER; note = 2'-O-methyl-guanosine
  modified_base 13: mod_base = OTHER; note = 2'-O-methyl-guanosine
  modified_base 14: mod_base = OTHER; note = 2'-O-methyl-cytidine
  modified_base 15: mod_base = OTHER; note = 2'-O-methyl-adenosine
  modified_base 16: mod_base = OTHER; note = 2'-O-methyl-cytidine
  modified_base 17: mod_base = OTHER; note = 2'-O-methyl-adenosine
  modified_base 18: mod_base = OTHER; note = 2'-O-methyl-uridine with phosphorothioate linkage
  modified_base 19: mod_base = OTHER; note = 2'-O-methyl-uridine with phosphorothioate linkage
  modified_base 20: mod_base = OTHER; note = 2'-O-methyl-adenosine
  modified_base 20: mod_base = OTHER; note = Nucleotide conjugated to 3 iterations of (2R,3R,4R,5S)-5-(3-(5-(((2R,3R,4R,5R,6R)- 3-acetamido-4,5-dihydroxy-6-(hydroxymethyl)tetrahydro-2H-py ran-2-yl)oxy) pentanamido)propyl)-2-((hydroxyl)methyl)-4-methoxytetrahydr ofuran-3-oxyl
agagttatcgaggcacatta

SEQ ID NO: 586 - RNA, 20 nt, synthetic construct
  source 1..20: mol_type = other RNA
  modified_base 1: mod_base = OTHER; note = 2'-O-methyl-guanosine with phosphorothioate linkage
  modified_base 2: mod_base = OTHER; note = 2'-O-methyl-cytidine with phosphorothioate linkage
  modified_base 3: mod_base = OTHER; note = 2'-O-methyl-adenosine
  modified_base 4: mod_base = OTHER; note = 2'-O-methyl-adenosine
  modified_base 5: mod_base = OTHER; note = 2'-O-methyl-cytidine
  modified_base 6: mod_base = OTHER; note = 2'-fluoro-cytidine
  modified_base 7: mod_base = OTHER; note = 2'-O-methyl-uridine
  modified_base 8: mod_base = OTHER; note = 2'-fluoro-guanosine
  modified_base 9: mod_base = OTHER; note = 2'-fluoro-adenosine
  modified_base 10: mod_base = OTHER; note = 2'-fluoro-cytidine
  modified_base 11: mod_base = OTHER; note = 2'-fluoro-adenosine
  modified_base 12: mod_base = OTHER; note = 2'-O-methyl-cytidine
  modified_base 13: mod_base = OTHER; note = 2'-O-methyl-adenosine
  modified_base 14: mod_base = OTHER; note = 2'-O-methyl-adenosine
  modified_base 15: mod_base = OTHER; note = 2'-O-methyl-uridine
  modified_base 16: mod_base = OTHER; note = 2'-O-methyl-guanosine
  modified_base 17: mod_base = OTHER; note = 2'-O-methyl-cytidine
  modified_base 18: mod_base = OTHER; note = 2'-O-methyl-uridine with phosphorothioate linkage
  modified_base 19: mod_base = OTHER; note = 2'-O-methyl-cytidine with phosphorothioate linkage
  modified_base 20: mod_base = OTHER; note = 2'-O-methyl-adenosine
  modified_base 20: mod_base = OTHER; note = Nucleotide conjugated to 3 iterations of (2R,3R,4R,5S)-5-(3-(5-(((2R,3R,4R,5R,6R)- 3-acetamido-4,5-dihydroxy-6-(hydroxymethyl)tetrahydro-2H-py ran-2-yl)oxy) pentanamido)propyl)-2-((hydroxyl)methyl)-4-methoxytetrahydr ofuran-3-oxyl
gcaacctgacacaatgctca

SEQ ID NO: 587 - RNA, 20 nt, synthetic construct
  source 1..20: mol_type = other RNA
  modified_base 1: mod_base = OTHER; note = 2'-O-methyl-cytidine with phosphorothioate linkage
  modified_base 2: mod_base = OTHER; note = 2'-O-methyl-uridine with phosphorothioate linkage
  modified_base 3: mod_base = OTHER; note = 2'-O-methyl-uridine
  modified_base 4: mod_base = OTHER; note = 2'-O-methyl-guanosine
  modified_base 5: mod_base = OTHER; note = 2'-O-methyl-cytidine
  modified_base 6: mod_base = OTHER; note = 2'-fluoro-cytidine
  modified_base 7: mod_base = OTHER; note = 2'-O-methyl-adenosine
  modified_base 8: mod_base = OTHER; note = 2'-fluoro-adenosine
  modified_base 9: mod_base = OTHER; note = 2'-fluoro-guanosine
  modified_base 10: mod_base = OTHER; note = 2'-fluoro-cytidine
  modified_base 11: mod_base = OTHER; note = 2'-fluoro-uridine
  modified_base 12: mod_base = OTHER; note = 2'-O-methyl-uridine
  modified_base 13: mod_base = OTHER; note = 2'-O-methyl-guanosine
  modified_base 14: mod_base = OTHER; note = 2'-O-methyl-guanosine
  modified_base 15: mod_base = OTHER; note = 2'-O-methyl-uridine
  modified_base 16: mod_base = OTHER; note = 2'-O-methyl-cytidine
  modified_base 17: mod_base = OTHER; note = 2'-O-methyl-adenosine
  modified_base 18: mod_base = OTHER; note = 2'-O-methyl-uridine with phosphorothioate linkage
  modified_base 19: mod_base = OTHER; note = 2'-O-methyl-cytidine with phosphorothioate linkage
  modified_base 20: mod_base = OTHER; note = 2'-O-methyl-adenosine
  modified_base 20: mod_base = OTHER; note = Nucleotide conjugated to 3 iterations of (2R,3R,4R,5S)-5-(3-(5-(((2R,3R,4R,5R,6R)- 3-acetamido-4,5-dihydroxy-6-(hydroxymethyl)tetrahydro-2H-py ran-2-yl)oxy) pentanamido)propyl)-2-((hydroxyl)methyl)-4-methoxytetrahydr ofuran-3-oxyl
cttgccaagcttggtcatca

SEQ ID NO: 588 - RNA, 20 nt, synthetic construct
  source 1..20: mol_type = other RNA
  modified_base 1: mod_base = OTHER; note = 2'-O-methyl-adenosine with phosphorothioate linkage
  modified_base 2: mod_base = OTHER; note = 2'-O-methyl-guanosine with phosphorothioate linkage
  modified_base 3: mod_base = OTHER; note = 2'-O-methyl-adenosine
  modified_base 4: mod_base = OTHER; note = 2'-O-methyl-adenosine
  modified_base 5: mod_base = OTHER; note = 2'-O-methyl-cytidine
  modified_base 6: mod_base = OTHER; note = 2'-fluoro-uridine
  modified_base 7: mod_base = OTHER; note = 2'-O-methyl-uridine
  modified_base 8: mod_base = OTHER; note = 2'-fluoro-guanosine
  modified_base 9: mod_base = OTHER; note = 2'-fluoro-cytidine
  modified_base 10: mod_base = OTHER; note = 2'-fluoro-cytidine
  modified_base 11: mod_base = OTHER; note = 2'-fluoro-adenosine
  modified_base 12: mod_base = OTHER; note = 2'-O-methyl-adenosine
  modified_base 13: mod_base = OTHER; note = 2'-O-methyl-guanosine
  modified_base 14: mod_base = OTHER; note = 2'-O-methyl-cytidine
  modified_base 15: mod_base = OTHER; note = 2'-O-methyl-uridine
  modified_base 16: mod_base = OTHER; note = 2'-O-methyl-uridine
  modified_base 17: mod_base = OTHER; note = 2'-O-methyl-guanosine
  modified_base 18: mod_base = OTHER; note = 2'-O-methyl-guanosine with phosphorothioate linkage
  modified_base 19: mod_base = OTHER; note = 2'-O-methyl-uridine with phosphorothioate linkage
  modified_base 20: mod_base = OTHER; note = 2'-O-methyl-adenosine
  modified_base 20: mod_base = OTHER; note = Nucleotide conjugated to 3 iterations of (2R,3R,4R,5S)-5-(3-(5-(((2R,3R,4R,5R,6R)- 3-acetamido-4,5-dihydroxy-6-(hydroxymethyl)tetrahydro-2H-py ran-2-yl)oxy) pentanamido)propyl)-2-((hydroxyl)methyl)-4-methoxytetrahydr ofuran-3-oxyl
agaacttgccaagcttggta

SEQ ID NO: 589 - RNA, 20 nt, synthetic construct
  source 1..20: mol_type = other RNA
  modified_base 1: mod_base = OTHER; note = 2'-O-methyl-uridine with phosphorothioate linkage
  modified_base 2: mod_base = OTHER; note = 2'-O-methyl-cytidine with phosphorothioate linkage
  modified_base 3: mod_base = OTHER; note = 2'-O-methyl-adenosine
  modified_base 4: mod_base = OTHER; note = 2'-O-methyl-uridine
  modified_base 5: mod_base = OTHER; note = 2'-O-methyl-cytidine
  modified_base 6: mod_base = OTHER; note = 2'-fluoro-uridine
  modified_base 7: mod_base = OTHER; note = 2'-O-methyl-adenosine
  modified_base 8: mod_base = OTHER; note = 2'-fluoro-uridine
  modified_base 9: mod_base = OTHER; note = 2'-fluoro-guanosine
  modified_base 10: mod_base = OTHER; note = 2'-fluoro-adenosine
  modified_base 11: mod_base = OTHER; note = 2'-fluoro-cytidine
  modified_base 12: mod_base = OTHER; note = 2'-O-methyl-adenosine
  modified_base 13: mod_base = OTHER; note = 2'-O-methyl-cytidine
  modified_base 14: mod_base = OTHER; note = 2'-O-methyl-cytidine
  modified_base 15: mod_base = OTHER; note = 2'-O-methyl-adenosine
  modified_base 16: mod_base = OTHER; note = 2'-O-methyl-cytidine
  modified_base 17: mod_base = OTHER; note = 2'-O-methyl-adenosine
  modified_base 18: mod_base = OTHER; note = 2'-O-methyl-cytidine with phosphorothioate linkage
  modified_base 19: mod_base = OTHER; note = 2'-O-methyl-uridine with phosphorothioate linkage
  modified_base 20: mod_base = OTHER; note = 2'-O-methyl-adenosine
  modified_base 20: mod_base = OTHER; note = Nucleotide conjugated to 3 iterations of (2R,3R,4R,5S)-5-(3-(5-(((2R,3R,4R,5R,6R)- 3-acetamido-4,5-dihydroxy-6-(hydroxymethyl)tetrahydro-2H-py ran-2-yl)oxy) pentanamido)propyl)-2-((hydroxyl)methyl)-4-methoxytetrahydr ofuran-3-oxyl
tcatctatgacaccacacta

SEQ ID NO: 590 - RNA, 20 nt, synthetic construct
  source 1..20: mol_type = other RNA
  modified_base 1: mod_base = OTHER; note = 2'-O-methyl-adenosine with phosphorothioate linkage
  modified_base 2: mod_base = OTHER; note = 2'-O-methyl-cytidine with phosphorothioate linkage
  modified_base 3: mod_base = OTHER; note = 2'-O-methyl-cytidine
  modified_base 4: mod_base = OTHER; note = 2'-O-methyl-adenosine
  modified_base 5: mod_base = OTHER; note = 2'-O-methyl-uridine
  modified_base 6: mod_base = OTHER; note = 2'-fluoro-guanosine
  modified_base 7: mod_base = OTHER; note = 2'-O-methyl-guanosine
  modified_base 8: mod_base = OTHER; note = 2'-fluoro-uridine
  modified_base 9: mod_base = OTHER; note = 2'-fluoro-guanosine
  modified_base 10: mod_base = OTHER; note = 2'-fluoro-adenosine
  modified_base 11: mod_base = OTHER; note = 2'-fluoro-uridine
  modified_base 12: mod_base = OTHER; note = 2'-O-methyl-guanosine
  modified_base 13: mod_base = OTHER; note = 2'-O-methyl-guanosine
  modified_base 14: mod_base = OTHER; note = 2'-O-methyl-adenosine
  modified_base 15: mod_base = OTHER; note = 2'-O-methyl-cytidine
  modified_base 16: mod_base = OTHER; note = 2'-O-methyl-adenosine
  modified_base 17: mod_base = OTHER; note = 2'-O-methyl-guanosine
  modified_base 18: mod_base = OTHER; note = 2'-O-methyl-adenosine with phosphorothioate linkage
  modified_base 19: mod_base = OTHER; note = 2'-O-methyl-guanosine with phosphorothioate linkage
  modified_base 20: mod_base = OTHER; note = 2'-O-methyl-adenosine
  modified_base 20: mod_base = OTHER; note = Nucleotide conjugated to 3 iterations of (2R,3R,4R,5S)-5-(3-(5-(((2R,3R,4R,5R,6R)- 3-acetamido-4,5-dihydroxy-6-(hydroxymethyl)tetrahydro-2H-py ran-2-yl)oxy) pentanamido)propyl)-2-((hydroxyl)methyl)-4-methoxytetrahydr ofuran-3-oxyl
accatggtgatggacagaga

SEQ ID NO: 591 - RNA, 20 nt, synthetic construct
  source 1..20: mol_type = other RNA
  modified_base 1: mod_base = OTHER; note = 2'-O-methyl-guanosine with phosphorothioate linkage
  modified_base 2: mod_base = OTHER; note = 2'-O-methyl-adenosine with phosphorothioate linkage
  modified_base 3: mod_base = OTHER; note = 2'-O-methyl-cytidine
  modified_base 4: mod_base = OTHER; note = 2'-O-methyl-adenosine
  modified_base 5: mod_base = OTHER; note = 2'-O-methyl-guanosine
  modified_base 6: mod_base = OTHER; note = 2'-fluoro-adenosine
  modified_base 7: mod_base = OTHER; note = 2'-O-methyl-guanosine
  modified_base 8: mod_base = OTHER; note = 2'-fluoro-uridine
  modified_base 9: mod_base = OTHER; note = 2'-fluoro-uridine
  modified_base 10: mod_base = OTHER; note = 2'-fluoro-adenosine
  modified_base 11: mod_base = OTHER; note = 2'-fluoro-uridine
  modified_base 12: mod_base = OTHER; note = 2'-O-methyl-cytidine
  modified_base 13: mod_base = OTHER; note = 2'-O-methyl-guanosine
  modified_base 14: mod_base = OTHER; note = 2'-O-methyl-adenosine
  modified_base 15: mod_base = OTHER; note = 2'-O-methyl-guanosine
  modified_base 16: mod_base = OTHER; note = 2'-O-methyl-guanosine
  modified_base 17: mod_base = OTHER; note = 2'-O-methyl-cytidine
  modified_base 18: mod_base = OTHER; note = 2'-O-methyl-adenosine with phosphorothioate linkage
  modified_base 19: mod_base = OTHER; note = 2'-O-methyl-cytidine with phosphorothioate linkage
  modified_base 20: mod_base = OTHER; note = 2'-O-methyl-adenosine
  modified_base 20: mod_base = OTHER; note = Nucleotide conjugated to 3 iterations of (2R,3R,4R,5S)-5-(3-(5-(((2R,3R,4R,5R,6R)- 3-acetamido-4,5-dihydroxy-6-(hydroxymethyl)tetrahydro-2H-py ran-2-yl)oxy) pentanamido)propyl)-2-((hydroxyl)methyl)-4-methoxytetrahydr ofuran-3-oxyl
gacagagttatcgaggcaca

SEQ ID NO: 592 - RNA, 22 nt, synthetic construct
  source 1..22: mol_type = other RNA
  modified_base 1: mod_base = OTHER; note = 2'-O-methyl-uridine with phosphorothioate linkage
  modified_base 2: mod_base = OTHER; note = 2'-fluoro-guanosine with phosphorothioate linkage
  modified_base 3: mod_base = OTHER; note = 2'-fluoro-uridine
  modified_base 4: mod_base = OTHER; note = 2'-O-methyl-guanosine
  modified_base 5: mod_base = OTHER; note = 2'-fluoro-guanosine
  modified_base 6: mod_base = OTHER; note = 2'-O-methyl-uridine
  modified_base 7: mod_base = OTHER; note = 2'-fluoro-guanosine
  modified_base 8: mod_base = OTHER; note = 2'-O-methyl-uridine
  modified_base 9: mod_base = OTHER; note = 2'-O-methyl-cytidine
  modified_base 10: mod_base = OTHER; note = 2'-fluoro-adenosine
  modified_base 11: mod_base = OTHER; note = 2'-O-methyl-uridine
  modified_base 12: mod_base = OTHER; note = 2'-O-methyl-adenosine
  modified_base 13: mod_base = OTHER; note = 2'-O-methyl-guanosine
  modified_base 14: mod_base = OTHER; note = 2'-fluoro-adenosine
  modified_base 15: mod_base = OTHER; note = 2'-O-methyl-uridine
  modified_base 16: mod_base = OTHER; note = 2'-fluoro-guanosine
  modified_base 17: mod_base = OTHER; note = 2'-O-methyl-adenosine
  modified_base 18: mod_base = OTHER; note = 2'-O-methyl-cytidine
  modified_base 19: mod_base = OTHER; note = 2'-O-methyl-cytidine
  modified_base 20: mod_base = OTHER; note = 2'-O-methyl-adenosine with phosphorothioate linkage
  modified_base 21: mod_base = OTHER; note = 2'-O-methyl-adenosine with phosphorothioate linkage
  modified_base 22: mod_base = OTHER; note = 2'-O-methyl-guanosine
tgtggtgtcatagatgaccaag

SEQ ID NO: 593 - RNA, 22 nt, synthetic construct
  source 1..22: mol_type = other RNA
  modified_base 1: mod_base = OTHER; note = 2'-O-methyl-uridine with phosphorothioate linkage
  modified_base 2: mod_base = OTHER; note = 2'-fluoro-adenosine with phosphorothioate linkage
  modified_base 3: mod_base = OTHER; note = 2'-fluoro-guanosine
  modified_base 4: mod_base = OTHER; note = 2'-O-methyl-uridine
  modified_base 5: mod_base = OTHER; note = 2'-fluoro-guanosine
  modified_base 6: mod_base = OTHER; note = 2'-O-methyl-guanosine
  modified_base 7: mod_base = OTHER; note = 2'-fluoro-uridine
  modified_base 8: mod_base = OTHER; note = 2'-O-methyl-guanosine
  modified_base 9: mod_base = OTHER; note = 2'-O-methyl-guanosine
  modified_base 10: mod_base = OTHER; note = 2'-fluoro-adenosine
  modified_base 11: mod_base = OTHER; note = 2'-O-methyl-guanosine
  modified_base 12: mod_base = OTHER; note = 2'-O-methyl-adenosine
  modified_base 13: mod_base = OTHER; note = 2'-O-methyl-adenosine
  modified_base 14: mod_base = OTHER; note = 2'-fluoro-uridine
  modified_base 15: mod_base = OTHER; note = 2'-O-methyl-guanosine
  modified_base 16: mod_base = OTHER; note = 2'-fluoro-adenosine
  modified_base 17: mod_base = OTHER; note = 2'-O-methyl-guanosine
  modified_base 18: mod_base = OTHER; note = 2'-O-methyl-cytidine
  modified_base 19: mod_base = OTHER; note = 2'-O-methyl-cytidine
  modified_base 20: mod_base = OTHER; note = 2'-O-methyl-uridine with phosphorothioate linkage
  modified_base 21: mod_base = OTHER; note = 2'-O-methyl-cytidine with phosphorothioate linkage
  modified_base 22: mod_base = OTHER; note = 2'-O-methyl-guanosine
tagtggtggagaatgagcctcg

SEQ ID NO: 594 - RNA, 22 nt, synthetic construct
  source 1..22: mol_type = other RNA
  modified_base 1: mod_base = OTHER; note = 2'-O-methyl-uridine with phosphorothioate linkage
  modified_base 2: mod_base = OTHER; note = 2'-fluoro-cytidine with phosphorothioate linkage
  modified_base 3: mod_base = OTHER; note = 2'-fluoro-cytidine
  modified_base 4: mod_base = OTHER; note = 2'-O-methyl-uridine
  modified_base 5: mod_base = OTHER; note = 2'-fluoro-cytidine
  modified_base 6: mod_base = OTHER; note = 2'-O-methyl-guanosine
  modified_base 7: mod_base = OTHER; note = 2'-fluoro-adenosine
  modified_base 8: mod_base = OTHER; note = 2'-O-methyl-uridine
  modified_base 9: mod_base = OTHER; note = 2'-O-methyl-adenosine
  modified_base 10: mod_base = OTHER; note = 2'-fluoro-adenosine
  modified_base 11: mod_base = OTHER; note = 2'-O-methyl-cytidine
  modified_base 12: mod_base = OTHER; note = 2'-O-methyl-uridine
  modified_base 13: mod_base = OTHER; note = 2'-O-methyl-cytidine
  modified_base 14: mod_base = OTHER; note = 2'-fluoro-uridine
  modified_base 15: mod_base = OTHER; note = 2'-O-methyl-guanosine
  modified_base 16: mod_base = OTHER; note = 2'-fluoro-uridine
  modified_base 17: mod_base = OTHER; note = 2'-O-methyl-cytidine
  modified_base 18: mod_base = OTHER; note = 2'-O-methyl-cytidine
  modified_base 19: mod_base = OTHER; note = 2'-O-methyl-adenosine
  modified_base 20: mod_base = OTHER; note = 2'-O-methyl-uridine with phosphorothioate linkage
  modified_base 21: mod_base = OTHER; note = 2'-O-methyl-cytidine with phosphorothioate linkage
  modified_base 22: mod_base = OTHER; note = 2'-O-methyl-adenosine
tcctcgataactctgtccatca

SEQ ID NO: 595 - RNA, 22 nt, synthetic construct
  source 1..22: mol_type = other RNA
  modified_base 1: mod_base = OTHER; note = 2'-O-methyl-uridine with phosphorothioate linkage
  modified_base 2: mod_base = OTHER; note = 2'-fluoro-uridine with phosphorothioate linkage
  modified_base 3: mod_base = OTHER; note = 2'-fluoro-adenosine
  modified_base 4: mod_base = OTHER; note = 2'-O-methyl-guanosine
  modified_base 5: mod_base = OTHER; note = 2'-fluoro-adenosine
  modified_base 6: mod_base = OTHER; note = 2'-O-methyl-uridine
  modified_base 7: mod_base = OTHER; note = 2'-fluoro-guanosine
  modified_base 8: mod_base = OTHER; note = 2'-O-methyl-adenosine
  modified_base 9: mod_base = OTHER; note = 2'-O-methyl-cytidine
  modified_base 10: mod_base = OTHER; note = 2'-fluoro-cytidine
  modified_base 11: mod_base = OTHER; note = 2'-O-methyl-adenosine
  modified_base 12: mod_base = OTHER; note = 2'-O-methyl-adenosine
  modified_base 13: mod_base = OTHER; note = 2'-O-methyl-guanosine
  modified_base 14: mod_base = OTHER; note = 2'-fluoro-cytidine
  modified_base 15: mod_base = OTHER; note = 2'-O-methyl-uridine
  modified_base 16: mod_base = OTHER; note = 2'-fluoro-uridine
  modified_base 17: mod_base = OTHER; note = 2'-O-methyl-guanosine
  modified_base 18: mod_base = OTHER; note = 2'-O-methyl-guanosine
  modified_base 19: mod_base = OTHER; note = 2'-O-methyl-cytidine
  modified_base 20: mod_base = OTHER; note = 2'-O-methyl-adenosine with phosphorothioate linkage
  modified_base 21: mod_base = OTHER; note = 2'-O-methyl-guanosine with phosphorothioate linkage
  modified_base 22: mod_base = OTHER; note = 2'-O-methyl-guanosine
ttagatgaccaagcttggcagg

SEQ ID NO: 596 - RNA, 22 nt, synthetic construct
  source 1..22: mol_type = other RNA
  modified_base 1: mod_base = OTHER; note = 2'-O-methyl-uridine with phosphorothioate linkage
  modified_base 2: mod_base = OTHER; note = 2'-fluoro-adenosine with phosphorothioate linkage
  modified_base 3: mod_base = OTHER; note = 2'-fluoro-guanosine
  modified_base 4: mod_base = OTHER; note = 2'-O-methyl-cytidine
  modified_base 5: mod_base = OTHER; note = 2'-fluoro-adenosine
  modified_base 6: mod_base = OTHER; note = 2'-O-methyl-uridine
  modified_base 7: mod_base = OTHER; note = 2'-fluoro-uridine
  modified_base 8: mod_base = OTHER; note = 2'-O-methyl-guanosine
  modified_base 9: mod_base = OTHER; note = 2'-O-methyl-uridine
  modified_base 10: mod_base = OTHER; note = 2'-fluoro-guanosine
  modified_base 11: mod_base = OTHER; note = 2'-O-methyl-uridine
  modified_base 12: mod_base = OTHER; note = 2'-O-methyl-cytidine
  modified_base 13: mod_base = OTHER; note = 2'-O-methyl-adenosine
  modified_base 14: mod_base = OTHER; note = 2'-fluoro-guanosine
  modified_base 15: mod_base = OTHER; note = 2'-O-methyl-guanosine
  modified_base 16: mod_base = OTHER; note = 2'-fluoro-uridine
  modified_base 17: mod_base = OTHER; note = 2'-O-methyl-uridine
  modified_base 18: mod_base = OTHER; note = 2'-O-methyl-guanosine
  modified_base 19: mod_base = OTHER; note = 2'-O-methyl-cytidine
  modified_base 20: mod_base = OTHER; note = 2'-O-methyl-adenosine with phosphorothioate linkage
  modified_base 21: mod_base = OTHER; note = 2'-O-methyl-guanosine with phosphorothioate linkage
  modified_base 22: mod_base = OTHER; note = 2'-O-methyl-uridine
tagcattgtgtcaggttgcagt

SEQ ID NO: 597 - RNA, 22 nt, synthetic construct
  source 1..22: mol_type = other RNA
  modified_base 1: mod_base = OTHER; note = 2'-O-methyl-uridine with phosphorothioate linkage
  modified_base 2: mod_base = OTHER; note = 2'-fluoro-adenosine with phosphorothioate linkage
  modified_base 3: mod_base = OTHER; note = 2'-fluoro-guanosine
  modified_base 4: mod_base = OTHER; note = 2'-O-methyl-adenosine
  modified_base 5: mod_base = OTHER; note = 2'-fluoro-adenosine
  modified_base 6: mod_base = OTHER; note = 2'-O-methyl-uridine
  modified_base 7: mod_base = OTHER; note = 2'-fluoro-guanosine
  modified_base 8: mod_base = OTHER; note = 2'-O-methyl-uridine
  modified_base 9: mod_base = OTHER; note = 2'-O-methyl-guanosine
  modified_base 10: mod_base = OTHER; note = 2'-fluoro-cytidine
  modified_base 11: mod_base = OTHER; note = 2'-O-methyl-cytidine
  modified_base 12: mod_base = OTHER; note = 2'-O-methyl-uridine
  modified_base 13: mod_base = OTHER; note = 2'-O-methyl-cytidine
  modified_base 14: mod_base = OTHER; note = 2'-fluoro-guanosine
  modified_base 15: mod_base = OTHER; note = 2'-O-methyl-adenosine
  modified_base 16: mod_base = OTHER; note = 2'-fluoro-uridine
  modified_base 17: mod_base = OTHER; note = 2'-O-methyl-adenosine
  modified_base 18: mod_base = OTHER; note = 2'-O-methyl-adenosine
  modified_base 19: mod_base = OTHER; note = 2'-O-methyl-cytidine
  modified_base 20: mod_base = OTHER; note = 2'-O-methyl-uridine with phosphorothioate linkage
  modified_base 21: mod_base = OTHER; note = 2'-O-methyl-cytidine with phosphorothioate linkage
  modified_base 22: mod_base = OTHER; note = 2'-O-methyl-uridine
tagaatgtgcctcgataactct

SEQ ID NO: 598 - RNA, 22 nt, synthetic construct
  source 1..22: mol_type = other RNA
  modified_base 1: mod_base = OTHER; note = 2'-O-methyl-uridine with phosphorothioate linkage
  modified_base 2: mod_base = OTHER; note = 2'-fluoro-guanosine with phosphorothioate linkage
  modified_base 3: mod_base = OTHER; note = 2'-fluoro-uridine
  modified_base 4: mod_base = OTHER; note = 2'-O-methyl-cytidine
  modified_base 5: mod_base = OTHER; note = 2'-fluoro-adenosine
  modified_base 6: mod_base = OTHER; note = 2'-O-methyl-uridine
  modified_base 7: mod_base = OTHER; note = 2'-fluoro-adenosine
  modified_base 8: mod_base = OTHER; note = 2'-O-methyl-guanosine
  modified_base 9: mod_base = OTHER; note = 2'-O-methyl-adenosine
  modified_base 10: mod_base = OTHER; note = 2'-fluoro-uridine
  modified_base 11: mod_base = OTHER; note = 2'-O-methyl-guanosine
  modified_base 12: mod_base = OTHER; note = 2'-O-methyl-adenosine
  modified_base 13: mod_base = OTHER; note = 2'-O-methyl-cytidine
  modified_base 14: mod_base = OTHER; note = 2'-fluoro-cytidine
  modified_base 15: mod_base = OTHER; note = 2'-O-methyl-adenosine
  modified_base 16: mod_base = OTHER; note = 2'-fluoro-adenosine
  modified_base 17: mod_base = OTHER; note = 2'-O-methyl-guanosine
  modified_base 18: mod_base = OTHER; note = 2'-O-methyl-cytidine
  modified_base 19: mod_base = OTHER; note = 2'-O-methyl-uridine
  modified_base 20: mod_base = OTHER; note = 2'-O-methyl-uridine with phosphorothioate linkage
  modified_base 21: mod_base = OTHER; note = 2'-O-methyl-guanosine with phosphorothioate linkage
  modified_base 22: mod_base = OTHER; note = 2'-O-methyl-guanosine
tgtcatagatgaccaagcttgg

SEQ ID NO: 599 - RNA, 22 nt, synthetic construct
  source 1..22: mol_type = other RNA
  modified_base 1: mod_base = OTHER; note = 2'-O-methyl-uridine with phosphorothioate linkage
  modified_base 2: mod_base = OTHER; note = 2'-fluoro-adenosine with phosphorothioate linkage
  modified_base 3: mod_base = OTHER; note = 2'-fluoro-adenosine
  modified_base 4: mod_base = OTHER; note = 2'-O-methyl-cytidine
  modified_base 5: mod_base = OTHER; note = 2'-fluoro-uridine
  modified_base 6: mod_base = OTHER; note = 2'-O-methyl-cytidine
  modified_base 7: mod_base = OTHER; note = 2'-fluoro-uridine
  modified_base 8: mod_base = OTHER; note = 2'-O-methyl-guanosine
  modified_base 9: mod_base = OTHER; note = 2'-O-methyl-uridine
  modified_base 10: mod_base = OTHER; note = 2'-fluoro-cytidine
  modified_base 11: mod_base = OTHER; note = 2'-O-methyl-cytidine
  modified_base 12: mod_base = OTHER; note = 2'-O-methyl-adenosine
  modified_base 13: mod_base = OTHER; note = 2'-O-methyl-uridine
  modified_base 14: mod_base = OTHER; note = 2'-fluoro-cytidine
  modified_base 15: mod_base = OTHER; note = 2'-O-methyl-adenosine
  modified_base 16: mod_base = OTHER; note = 2'-fluoro-cytidine
  modified_base 17: mod_base = OTHER; note = 2'-O-methyl-cytidine
  modified_base 18: mod_base = OTHER; note = 2'-O-methyl-adenosine
  modified_base 19: mod_base = OTHER; note = 2'-O-methyl-uridine
  modified_base 20: mod_base = OTHER; note = 2'-O-methyl-guanosine with phosphorothioate linkage
  modified_base 21: mod_base = OTHER; note = 2'-O-methyl-guanosine with phosphorothioate linkage
  modified_base 22: mod_base = OTHER; note = 2'-O-methyl-uridine
taactctgtccatcaccatggt

SEQ ID NO: 600 - RNA, 22 nt, synthetic construct
  source 1..22: mol_type = other RNA
  modified_base 1: mod_base = OTHER; note = 2'-O-methyl-uridine with phosphorothioate linkage
  modified_base 2: mod_base = OTHER; note = 2'-fluoro-guanosine with phosphorothioate linkage
  modified_base 3: mod_base = OTHER; note = 2'-fluoro-cytidine
  modified_base 4: mod_base = OTHER; note = 2'-O-methyl-cytidine
  modified_base 5: mod_base = OTHER; note = 2'-fluoro-uridine
  modified_base 6: mod_base = OTHER; note = 2'-O-methyl-cytidine
  modified_base 7: mod_base = OTHER; note = 2'-fluoro-guanosine
  modified_base 8: mod_base = OTHER; note = 2'-O-methyl-adenosine
  modified_base 9: mod_base = OTHER; note = 2'-O-methyl-uridine
  modified_base 10: mod_base = OTHER; note = 2'-fluoro-adenosine
  modified_base 11: mod_base = OTHER; note = 2'-O-methyl-adenosine
  modified_base 12: mod_base = OTHER; note = 2'-O-methyl-cytidine
  modified_base 13: mod_base = OTHER; note = 2'-O-methyl-uridine
  modified_base 14: mod_base = OTHER; note = 2'-fluoro-cytidine
  modified_base 15: mod_base = OTHER; note = 2'-O-methyl-uridine
  modified_base 16: mod_base = OTHER; note = 2'-fluoro-guanosine
  modified_base 17: mod_base = OTHER; note = 2'-O-methyl-uridine
  modified_base 18: mod_base = OTHER; note = 2'-O-methyl-cytidine
  modified_base 19: mod_base = OTHER; note = 2'-O-methyl-cytidine
  modified_base 20: mod_base = OTHER; note = 2'-O-methyl-adenosine with phosphorothioate linkage
  modified_base 21: mod_base = OTHER; note = 2'-O-methyl-uridine with phosphorothioate linkage
  modified_base 22: mod_base = OTHER; note = 2'-O-methyl-cytidine
tgcctcgataactctgtccatc

SEQ ID NO: 601 - RNA, 22 nt, synthetic construct
  source 1..22: mol_type = other RNA
  modified_base 1: mod_base = OTHER; note = 2'-O-methyl-uridine with phosphorothioate linkage
  modified_base 2: mod_base = OTHER; note = 2'-fluoro-adenosine with phosphorothioate linkage
  modified_base 3: mod_base = OTHER; note = 2'-fluoro-guanosine
  modified_base 4: mod_base = OTHER; note = 2'-O-methyl-uridine
  modified_base 5: mod_base = OTHER; note = 2'-fluoro-adenosine
  modified_base 6: mod_base = OTHER; note = 2'-O-methyl-guanosine
  modified_base 7: mod_base = OTHER; note = 2'-fluoro-uridine
  modified_base 8: mod_base = OTHER; note = 2'-O-methyl-uridine
  modified_base 9: mod_base = OTHER; note = 2'-O-methyl-cytidine
  modified_base 10: mod_base = OTHER; note = 2'-fluoro-cytidine
  modified_base 11: mod_base = OTHER; note = 2'-O-methyl-uridine
  modified_base 12: mod_base = OTHER; note = 2'-O-methyl-guanosine
  modified_base 13: mod_base = OTHER; note = 2'-O-methyl-guanosine
  modified_base 14: mod_base = OTHER; note = 2'-fluoro-uridine
  modified_base 15: mod_base = OTHER; note = 2'-O-methyl-cytidine
  modified_base 16: mod_base = OTHER; note = 2'-fluoro-adenosine
  modified_base 17: mod_base = OTHER; note = 2'-O-methyl-guanosine
  modified_base 18: mod_base = OTHER; note = 2'-O-methyl-guanosine
  modified_base 19: mod_base = OTHER; note = 2'-O-methyl-cytidine
  modified_base 20: mod_base = OTHER; note = 2'-O-methyl-cytidine with phosphorothioate linkage
  modified_base 21: mod_base = OTHER; note = 2'-O-methyl-adenosine with phosphorothioate linkage
  modified_base 22: mod_base = OTHER; note = 2'-O-methyl-guanosine
tagtagttcctggtcaggccag

SEQ ID NO: 602 - RNA, 22 nt, synthetic construct
  source 1..22: mol_type = other RNA
  modified_base 1: mod_base = OTHER; note = 2'-O-methyl-uridine with phosphorothioate linkage
  modified_base 2: mod_base = OTHER; note = 2'-fluoro-cytidine with phosphorothioate linkage
  modified_base 3: mod_base = OTHER; note = 2'-fluoro-uridine
  modified_base 4: mod_base = OTHER; note = 2'-O-methyl-uridine
  modified_base 5: mod_base = OTHER; note = 2'-fluoro-uridine
  modified_base 6: mod_base = OTHER; note = 2'-O-methyl-uridine
  modified_base 7: mod_base = OTHER; note = 2'-fluoro-cytidine
  modified_base 8: mod_base = OTHER; note = 2'-O-methyl-uridine
  modified_base 9: mod_base = OTHER; note = 2'-O-methyl-cytidine
  modified_base 10: mod_base = OTHER; note = 2'-fluoro-adenosine
  modified_base 11: mod_base = OTHER; note = 2'-O-methyl-guanosine
  modified_base 12: mod_base = OTHER; note = 2'-O-methyl-guanosine
  modified_base 13: mod_base = OTHER; note = 2'-O-methyl-uridine
  modified_base 14: mod_base = OTHER; note = 2'-fluoro-guanosine
  modified_base 15: mod_base = OTHER; note = 2'-O-methyl-guanosine
  modified_base 16: mod_base = OTHER; note = 2'-fluoro-uridine
  modified_base 17: mod_base = OTHER; note = 2'-O-methyl-guanosine
  modified_base 18: mod_base = OTHER; note = 2'-O-methyl-cytidine
  modified_base 19: mod_base = OTHER; note = 2'-O-methyl-uridine
  modified_base 20: mod_base = OTHER; note = 2'-O-methyl-uridine with phosphorothioate linkage
  modified_base 21: mod_base = OTHER; note = 2'-O-methyl-guanosine with phosphorothioate linkage
  modified_base 22: mod_base = OTHER; note = 2'-O-methyl-uridine
tcttttctcaggtggtgcttgt

SEQ ID NO: 603 - RNA, 22 nt, synthetic construct
  source 1..22: mol_type = other RNA
  modified_base 1: mod_base = OTHER; note = 2'-O-methyl-uridine with phosphorothioate linkage
  modified_base 2: mod_base = OTHER; note = 2'-fluoro-guanosine with phosphorothioate linkage
  modified_base 3: mod_base = OTHER; note = 2'-fluoro-adenosine
  modified_base 4: mod_base = OTHER; note = 2'-O-methyl-adenosine
  modified_base 5: mod_base = OTHER; note = 2'-fluoro-uridine
  modified_base 6: mod_base = OTHER; note = 2'-O-methyl-guanosine
  modified_base 7: mod_base = OTHER; note = 2'-fluoro-uridine
  modified_base 8: mod_base = OTHER; note = 2'-O-methyl-guanosine
  modified_base 9: mod_base = OTHER; note = 2'-O-methyl-cytidine
  modified_base 10: mod_base = OTHER; note = 2'-fluoro-cytidine
  modified_base 11: mod_base = OTHER; note = 2'-O-methyl-uridine
  modified_base 12: mod_base = OTHER; note = 2'-O-methyl-cytidine
  modified_base 13: mod_base = OTHER; note = 2'-O-methyl-guanosine
  modified_base 14: mod_base = OTHER; note = 2'-fluoro-adenosine
  modified_base 15: mod_base = OTHER; note = 2'-O-methyl-uridine
  modified_base 16: mod_base = OTHER; note = 2'-fluoro-adenosine
  modified_base 17: mod_base = OTHER; note = 2'-O-methyl-adenosine
  modified_base 18: mod_base = OTHER; note = 2'-O-methyl-cytidine
  modified_base 19: mod_base = OTHER; note = 2'-O-methyl-uridine
  modified_base 20: mod_base = OTHER; note = 2'-O-methyl-cytidine with phosphorothioate linkage
  modified_base 21: mod_base = OTHER; note = 2'-O-methyl-uridine with phosphorothioate linkage
  modified_base 22: mod_base = OTHER; note = 2'-O-methyl-guanosine
tgaatgtgcctcgataactctg

SEQ ID NO: 604 - RNA, 22 nt, synthetic construct
  source 1..22: mol_type = other RNA
  modified_base 1: mod_base = OTHER; note = 2'-O-methyl-uridine with phosphorothioate linkage
  modified_base 2: mod_base = OTHER; note = 2'-fluoro-adenosine with phosphorothioate linkage
  modified_base 3: mod_base = OTHER; note = 2'-fluoro-uridine
  modified_base 4: mod_base = OTHER; note = 2'-O-methyl-guanosine
  modified_base 5: mod_base = OTHER; note = 2'-fluoro-adenosine
  modified_base 6: mod_base = OTHER; note = 2'-O-methyl-cytidine
  modified_base 7: mod_base = OTHER; note = 2'-fluoro-cytidine
  modified_base 8: mod_base = OTHER; note = 2'-O-methyl-adenosine
  modified_base 9: mod_base = OTHER; note = 2'-O-methyl-adenosine
  modified_base 10: mod_base = OTHER; note = 2'-fluoro-guanosine
  modified_base 11: mod_base = OTHER; note = 2'-O-methyl-cytidine
  modified_base 12: mod_base = OTHER; note = 2'-O-methyl-uridine
  modified_base 13: mod_base = OTHER; note = 2'-O-methyl-uridine
  modified_base 14: mod_base = OTHER; note = 2'-fluoro-guanosine
  modified_base 15: mod_base = OTHER; note = 2'-O-methyl-guanosine
  modified_base 16: mod_base = OTHER; note = 2'-fluoro-cytidine
  modified_base 17: mod_base = OTHER; note = 2'-O-methyl-adenosine
  modified_base 18: mod_base = OTHER; note = 2'-O-methyl-guanosine
  modified_base 19: mod_base = OTHER; note = 2'-O-methyl-guanosine
  modified_base 20: mod_base = OTHER; note = 2'-O-methyl-uridine with phosphorothioate linkage
  modified_base 21: mod_base = OTHER; note = 2'-O-methyl-cytidine with phosphorothioate linkage
  modified_base 22: mod_base = OTHER; note = 2'-O-methyl-cytidine
tatgaccaagcttggcaggtcc

SEQ ID NO: 605 - RNA, 22 nt, synthetic construct
  source 1..22: mol_type = other RNA
  modified_base 1: mod_base = OTHER; note = 2'-O-methyl-uridine with phosphorothioate linkage
  modified_base 2: mod_base = OTHER; note = 2'-fluoro-uridine with phosphorothioate linkage
  modified_base 3: mod_base = OTHER; note = 2'-fluoro-guanosine
  modified_base 4: mod_base = OTHER; note = 2'-O-methyl-adenosine
  modified_base 5: mod_base = OTHER; note = 2'-fluoro-cytidine
  modified_base 6: mod_base = OTHER; note = 2'-O-methyl-cytidine
  modified_base 7: mod_base = OTHER; note = 2'-fluoro-adenosine
  modified_base 8: mod_base = OTHER; note = 2'-O-methyl-adenosine
  modified_base 9: mod_base = OTHER; note = 2'-O-methyl-guanosine
  modified_base 10: mod_base = OTHER; note = 2'-fluoro-cytidine
  modified_base 11: mod_base = OTHER; note = 2'-O-methyl-uridine
  modified_base 12: mod_base = OTHER; note = 2'-O-methyl-uridine
  modified_base 13: mod_base = OTHER; note = 2'-O-methyl-guanosine
  modified_base 14: mod_base = OTHER; note = 2'-fluoro-guanosine
  modified_base 15: mod_base = OTHER; note = 2'-O-methyl-cytidine
  modified_base 16: mod_base = OTHER; note = 2'-fluoro-adenosine
  modified_base 17: mod_base = OTHER; note = 2'-O-methyl-adenosine
  modified_base 18: mod_base = OTHER; note = 2'-O-methyl-guanosine
  modified_base 19: mod_base = OTHER; note = 2'-O-methyl-uridine
  modified_base 20: mod_base = OTHER; note = 2'-O-methyl-uridine with phosphorothioate linkage
  modified_base 21: mod_base = OTHER; note = 2'-O-methyl-cytidine with phosphorothioate linkage
  modified_base 22: mod_base = OTHER; note = 2'-O-methyl-uridine
ttgaccaagcttggcaagttct

SEQ ID NO: 606 - RNA, 22 nt, synthetic construct
  source 1..22: mol_type = other RNA
  modified_base 1: mod_base = OTHER; note = 2'-O-methyl-uridine with phosphorothioate linkage
  modified_base 2: mod_base = OTHER; note = 2'-fluoro-guanosine with phosphorothioate linkage
  modified_base 3: mod_base = OTHER; note = 2'-fluoro-cytidine
  modified_base 4: mod_base = OTHER; note = 2'-O-methyl-cytidine
  modified_base 5: mod_base = OTHER; note = 2'-fluoro-adenosine
  modified_base 6: mod_base = OTHER; note = 2'-O-methyl-cytidine
  modified_base 7: mod_base = OTHER; note = 2'-fluoro-adenosine
  modified_base 8: mod_base = OTHER; note = 2'-O-methyl-guanosine
  modified_base 9: mod_base = OTHER; note = 2'-O-methyl-guanosine
  modified_base 10: mod_base = OTHER; note = 2'-fluoro-adenosine
  modified_base 11: mod_base = OTHER; note = 2'-O-methyl-uridine
  modified_base 12: mod_base = OTHER; note = 2'-O-methyl-cytidine
  modified_base 13: mod_base = OTHER; note = 2'-O-methyl-uridine
  modified_base 14: mod_base = OTHER; note = 2'-fluoro-guanosine
  modified_base 15: mod_base = OTHER; note = 2'-O-methyl-guanosine
  modified_base 16: mod_base = OTHER; note = 2'-fluoro-adenosine
  modified_base 17: mod_base = OTHER; note = 2'-O-methyl-uridine
  modified_base 18: mod_base = OTHER; note = 2'-O-methyl-uridine
  modified_base 19: mod_base = OTHER; note = 2'-O-methyl-uridine
  modified_base 20: mod_base = OTHER; note = 2'-O-methyl-cytidine with phosphorothioate linkage
  modified_base 21: mod_base = OTHER; note = 2'-O-methyl-guanosine with phosphorothioate linkage
  modified_base 22: mod_base = OTHER; note = 2'-O-methyl-guanosine
tgccacaggatctggatttcgg

SEQ ID NO: 607 - RNA, 22 nt, synthetic construct
  source 1..22: mol_type = other RNA
  modified_base 1: mod_base = OTHER; note = 2'-O-methyl-uridine with phosphorothioate linkage
  modified_base 2: mod_base = OTHER; note = 2'-fluoro-cytidine with phosphorothioate linkage
  modified_base 3: mod_base = OTHER; note = 2'-fluoro-uridine
  modified_base 4: mod_base = OTHER; note = 2'-O-methyl-guanosine
  modified_base 5: mod_base = OTHER; note = 2'-fluoro-adenosine
  modified_base 6: mod_base = OTHER; note = 2'-O-methyl-guanosine
  modified_base 7: mod_base = OTHER; note = 2'-fluoro-cytidine
  modified_base 8: mod_base = OTHER; note = 2'-O-methyl-adenosine
  modified_base 9: mod_base = OTHER; note = 2'-O-methyl-uridine
  modified_base 10: mod_base = OTHER; note = 2'-fluoro-uridine
  modified_base 11: mod_base = OTHER; note = 2'-O-methyl-guanosine
  modified_base 12: mod_base = OTHER; note = 2'-O-methyl-uridine
  modified_base 13: mod_base = OTHER; note = 2'-O-methyl-guanosine
  modified_base 14: mod_base = OTHER; note = 2'-fluoro-uridine
  modified_base 15: mod_base = OTHER; note = 2'-O-methyl-cytidine
  modified_base 16: mod_base = OTHER; note = 2'-fluoro-adenosine
  modified_base 17: mod_base = OTHER; note = 2'-O-methyl-guanosine
  modified_base 18: mod_base = OTHER; note = 2'-O-methyl-guanosine
  modified_base 19: mod_base = OTHER; note = 2'-O-methyl-uridine
  modified_base 20: mod_base = OTHER; note = 2'-O-methyl-uridine with phosphorothioate linkage
  modified_base 21: mod_base = OTHER; note = 2'-O-methyl-guanosine with phosphorothioate linkage
  modified_base 22: mod_base = OTHER; note = 2'-O-methyl-cytidine
tctgagcattgtgtcaggttgc

SEQ ID NO: 608 - RNA, 22 nt, synthetic construct
  source 1..22: mol_type = other RNA
  modified_base 1: mod_base = OTHER; note = 2'-O-methyl-uridine with phosphorothioate linkage
  modified_base 2: mod_base = OTHER; note = 2'-fluoro-adenosine with phosphorothioate linkage
  modified_base 3: mod_base = OTHER; note = 2'-fluoro-cytidine
  modified_base 4: mod_base = OTHER; note = 2'-O-methyl-uridine
  modified_base 5: mod_base = OTHER; note = 2'-fluoro-cytidine
  modified_base 6: mod_base = OTHER; note = 2'-O-methyl-uridine
  modified_base 7: mod_base = OTHER; note = 2'-fluoro-guanosine
  modified_base 8: mod_base = OTHER; note = 2'-O-methyl-uridine
  modified_base 9: mod_base = OTHER; note = 2'-O-methyl-cytidine
  modified_base 10: mod_base = OTHER; note = 2'-fluoro-cytidine
  modified_base 11: mod_base = OTHER; note = 2'-O-methyl-adenosine
  modified_base 12: mod_base = OTHER; note = 2'-O-methyl-uridine
  modified_base 13: mod_base = OTHER; note = 2'-O-methyl-cytidine
  modified_base 14: mod_base = OTHER; note = 2'-fluoro-adenosine
  modified_base 15: mod_base = OTHER; note = 2'-O-methyl-cytidine
  modified_base 16: mod_base = OTHER; note = 2'-fluoro-cytidine
  modified_base 17: mod_base = OTHER; note = 2'-O-methyl-adenosine
  modified_base 18: mod_base = OTHER; note = 2'-O-methyl-uridine
  modified_base 19: mod_base = OTHER; note = 2'-O-methyl-guanosine
  modified_base 20: mod_base = OTHER; note = 2'-O-methyl-guanosine with phosphorothioate linkage
  modified_base 21: mod_base = OTHER; note = 2'-O-methyl-uridine with phosphorothioate linkage
  modified_base 22: mod_base = OTHER; note = 2'-O-methyl-adenosine
tactctgtccatcaccatggta

SEQ ID NO: 609 - RNA, 22 nt, synthetic construct
  source 1..22: mol_type = other RNA
  modified_base 1: mod_base = OTHER; note = 2'-O-methyl-uridine with phosphorothioate linkage
  modified_base 2: mod_base = OTHER; note = 2'-fluoro-adenosine with phosphorothioate linkage
  modified_base 3: mod_base = OTHER; note = 2'-fluoro-uridine
  modified_base 4: mod_base = OTHER; note = 2'-O-methyl-guanosine
  modified_base 5: mod_base = OTHER; note = 2'-fluoro-uridine
  modified_base 6: mod_base = OTHER; note = 2'-O-methyl-guanosine
  modified_base 7: mod_base = OTHER; note = 2'-fluoro-cytidine
  modified_base 8: mod_base = OTHER; note = 2'-O-methyl-cytidine
  modified_base 9: mod_base = OTHER; note = 2'-O-methyl-uridine
  modified_base 10: mod_base = OTHER; note = 2'-fluoro-cytidine
  modified_base 11: mod_base = OTHER; note = 2'-O-methyl-guanosine
  modified_base 12: mod_base = OTHER; note = 2'-O-methyl-adenosine
  modified_base 13: mod_base = OTHER; note = 2'-O-methyl-uridine
  modified_base 14: mod_base = OTHER; note = 2'-fluoro-adenosine
  modified_base 15: mod_base = OTHER; note = 2'-O-methyl-adenosine
  modified_base 16: mod_base = OTHER; note = 2'-fluoro-cytidine
  modified_base 17: mod_base = OTHER; note = 2'-O-methyl-uridine
  modified_base 18: mod_base = OTHER; note = 2'-O-methyl-cytidine
  modified_base 19: mod_base = OTHER; note = 2'-O-methyl-uridine
  modified_base 20: mod_base = OTHER; note = 2'-O-methyl-guanosine with phosphorothioate linkage
  modified_base 21: mod_base = OTHER; note = 2'-O-methyl-guanosine with phosphorothioate linkage
  modified_base 22: mod_base = OTHER; note = 2'-O-methyl-cytidine
tatgtgcctcgataactctggc

SEQ ID NO: 610 - RNA, 22 nt, synthetic construct
  source 1..22: mol_type = other RNA
  modified_base 1: mod_base = OTHER; note = 2'-O-methyl-uridine with phosphorothioate linkage
  modified_base 2: mod_base = OTHER; note = 2'-fluoro-uridine with phosphorothioate linkage
  modified_base 3: mod_base = OTHER; note = 2'-fluoro-adenosine
  modified_base 4: mod_base = OTHER; note = 2'-O-methyl-guanosine
  modified_base 5: mod_base = OTHER; note = 2'-fluoro-adenosine
  modified_base 6: mod_base = OTHER; note = 2'-O-methyl-uridine
  modified_base 7: mod_base = OTHER; note = 2'-fluoro-guanosine
  modified_base 8: mod_base = OTHER; note = 2'-O-methyl-adenosine
  modified_base 9: mod_base = OTHER; note = 2'-O-methyl-cytidine
  modified_base 10: mod_base = OTHER; note = 2'-fluoro-cytidine
  modified_base 11: mod_base = OTHER; note = 2'-O-methyl-adenosine
  modified_base 12: mod_base = OTHER; note = 2'-O-methyl-adenosine
  modified_base 13: mod_base = OTHER; note = 2'-O-methyl-guanosine
  modified_base 14: mod_base = OTHER; note = 2'-fluoro-cytidine
  modified_base 15: mod_base = OTHER; note = 2'-O-methyl-uridine
  modified_base 16: mod_base = OTHER; note = 2'-fluoro-uridine
  modified_base 17: mod_base = OTHER; note = 2'-O-methyl-guanosine
  modified_base 18: mod_base = OTHER; note = 2'-O-methyl-guanosine
  modified_base 19: mod_base = OTHER; note = 2'-O-methyl-cytidine
  modified_base 20: mod_base = OTHER; note = 2'-O-methyl-adenosine with phosphorothioate linkage
  modified_base 21: mod_base = OTHER; note = 2'-O-methyl-adenosine with phosphorothioate linkage
  modified_base 22: mod_base = OTHER; note = 2'-O-methyl-guanosine
ttagatgaccaagcttggcaag

SEQ ID NO: 611 - RNA, 22 nt, synthetic construct
  source 1..22: mol_type = other RNA
  modified_base 1: mod_base = OTHER; note = 2'-O-methyl-uridine with phosphorothioate linkage
  modified_base 2: mod_base = OTHER; note = 2'-fluoro-guanosine with phosphorothioate linkage
  modified_base 3: mod_base = OTHER; note = 2'-fluoro-adenosine
  modified_base 4: mod_base = OTHER; note = 2'-O-methyl-guanosine
  modified_base 5: mod_base = OTHER; note = 2'-fluoro-uridine
  modified_base 6: mod_base = OTHER; note = 2'-O-methyl-uridine
  modified_base 7: mod_base = OTHER; note = 2'-fluoro-guanosine
  modified_base 8: mod_base = OTHER; note = 2'-O-methyl-cytidine
  modified_base 9: mod_base = OTHER; note = 2'-O-methyl-adenosine
  modified_base 10: mod_base = OTHER; note = 2'-fluoro-adenosine
  modified_base 11: mod_base = OTHER; note = 2'-O-methyl-guanosine
  modified_base 12: mod_base = OTHER; note = 2'-O-methyl-guanosine
  modified_base 13: mod_base = OTHER; note = 2'-O-methyl-adenosine
  modified_base 14: mod_base = OTHER; note = 2'-fluoro-cytidine
  modified_base 15: mod_base = OTHER; note = 2'-O-methyl-adenosine
  modified_base 16: mod_base = OTHER; note = 2'-fluoro-cytidine
  modified_base 17: mod_base = OTHER; note = 2'-O-methyl-uridine
  modified_base 18: mod_base = OTHER; note = 2'-O-methyl-uridine
  modified_base 19: mod_base = OTHER; note = 2'-O-methyl-guanosine
  modified_base 20: mod_base = OTHER; note = 2'-O-methyl-adenosine with phosphorothioate linkage
  modified_base 21: mod_base = OTHER; note = 2'-O-methyl-uridine with phosphorothioate linkage
  modified_base 22: mod_base = OTHER; note = 2'-O-methyl-uridine
tgagttgcaaggacacttgatt

SEQ ID NO: 612 - RNA, 22 nt, synthetic construct
  source 1..22: mol_type = other RNA
  modified_base 1: mod_base = OTHER; note = 2'-O-methyl-uridine with phosphorothioate linkage
  modified_base 2: mod_base = OTHER; note = 2'-fluoro-guanosine with phosphorothioate linkage
  modified_base 3: mod_base = OTHER; note = 2'-fluoro-adenosine
  modified_base 4: mod_base = OTHER; note = 2'-O-methyl-guanosine
  modified_base 5: mod_base = OTHER; note = 2'-fluoro-uridine
  modified_base 6: mod_base = OTHER; note = 2'-O-methyl-guanosine
  modified_base 7: mod_base = OTHER; note = 2'-fluoro-uridine
  modified_base 8: mod_base = OTHER; note = 2'-O-methyl-guanosine
  modified_base 9: mod_base = OTHER; note = 2'-O-methyl-guanosine
  modified_base 10: mod_base = OTHER; note = 2'-fluoro-uridine
  modified_base 11: mod_base = OTHER; note = 2'-O-methyl-guanosine
  modified_base 12: mod_base = OTHER; note = 2'-O-methyl-uridine
  modified_base 13: mod_base = OTHER; note = 2'-O-methyl-cytidine
  modified_base 14: mod_base = OTHER; note = 2'-fluoro-adenosine
  modified_base 15: mod_base = OTHER; note = 2'-O-methyl-uridine
  modified_base 16: mod_base = OTHER; note = 2'-fluoro-adenosine
  modified_base 17: mod_base = OTHER; note = 2'-O-methyl-guanosine
  modified_base 18: mod_base = OTHER; note = 2'-O-methyl-adenosine
  modified_base 19: mod_base = OTHER; note = 2'-O-methyl-uridine
  modified_base 20: mod_base = OTHER; note = 2'-O-methyl-guanosine with phosphorothioate linkage
  modified_base 21: mod_base = OTHER; note = 2'-O-methyl-adenosine with phosphorothioate linkage
  modified_base 22: mod_base = OTHER; note = 2'-O-methyl-cytidine
tgagtgtggtgtcatagatgac

SEQ ID NO: 613 - RNA, 22 nt, synthetic construct
  source 1..22: mol_type = other RNA
  modified_base 1: mod_base = OTHER; note = 2'-O-methyl-uridine with phosphorothioate linkage
  modified_base 2: mod_base = OTHER; note = 2'-fluoro-uridine with phosphorothioate linkage
  modified_base 3: mod_base = OTHER; note = 2'-fluoro-guanosine
  modified_base 4: mod_base = OTHER; note = 2'-O-methyl-adenosine
  modified_base 5: mod_base = OTHER; note = 2'-fluoro-cytidine
  modified_base 6: mod_base = OTHER; note = 2'-O-methyl-cytidine
  modified_base 7: mod_base = OTHER; note = 2'-fluoro-adenosine
  modified_base 8: mod_base = OTHER; note = 2'-O-methyl-adenosine
  modified_base 9: mod_base = OTHER; note = 2'-O-methyl-guanosine
  modified_base 10: mod_base = OTHER; note = 2'-fluoro-cytidine
  modified_base 11: mod_base = OTHER; note = 2'-O-methyl-uridine
  modified_base 12: mod_base = OTHER; note = 2'-O-methyl-uridine
  modified_base 13: mod_base = OTHER; note = 2'-O-methyl-guanosine
  modified_base 14: mod_base = OTHER; note = 2'-fluoro-guanosine
  modified_base 15: mod_base = OTHER; note = 2'-O-methyl-cytidine
  modified_base 16: mod_base = OTHER; note = 2'-fluoro-adenosine
  modified_base 17: mod_base = OTHER; note = 2'-O-methyl-guanosine
  modified_base 18: mod_base = OTHER; note = 2'-O-methyl-guanosine
  modified_base 19: mod_base = OTHER; note = 2'-O-methyl-uridine
  modified_base 20: mod_base = OTHER; note = 2'-O-methyl-uridine with phosphorothioate linkage
  modified_base 21: mod_base = OTHER; note = 2'-O-methyl-cytidine with phosphorothioate linkage
  modified_base 22: mod_base = OTHER; note = 2'-O-methyl-uridine
ttgaccaagcttggcaggttct

SEQ ID NO: 614 - RNA, 22 nt, synthetic construct
  source 1..22: mol_type = other RNA
  modified_base 1: mod_base = OTHER; note = 2'-O-methyl-uridine with phosphorothioate linkage
  modified_base 2: mod_base = OTHER; note = 2'-fluoro-guanosine with phosphorothioate linkage
  modified_base 3: mod_base = OTHER; note = 2'-fluoro-cytidine
  modified_base 4: mod_base = OTHER; note = 2'-O-methyl-uridine
  modified_base 5: mod_base = OTHER; note = 2'-fluoro-cytidine
  modified_base 6: mod_base = OTHER; note = 2'-O-methyl-adenosine
  modified_base 7: mod_base = OTHER; note = 2'-fluoro-guanosine
  modified_base 8: mod_base = OTHER; note = 2'-O-methyl-uridine
  modified_base 9: mod_base = OTHER; note = 2'-O-methyl-cytidine
  modified_base 10: mod_base = OTHER; note = 2'-fluoro-guanosine
  modified_base 11: mod_base = OTHER; note = 2'-O-methyl-guanosine
  modified_base 12: mod_base = OTHER; note = 2'-O-methyl-uridine
  modified_base 13: mod_base = OTHER; note = 2'-O-methyl-guanosine
  modified_base 14: mod_base = OTHER; note = 2'-fluoro-cytidine
  modified_base 15: mod_base = OTHER; note = 2'-O-methyl-uridine
  modified_base 16: mod_base = OTHER; note = 2'-fluoro-uridine
  modified_base 17: mod_base = OTHER; note = 2'-O-methyl-guanosine
  modified_base 18: mod_base = OTHER; note = 2'-O-methyl-uridine
  modified_base 19: mod_base = OTHER; note = 2'-O-methyl-uridine
  modified_base 20: mod_base = OTHER; note = 2'-O-methyl-cytidine with phosphorothioate linkage
  modified_base 21: mod_base = OTHER; note = 2'-O-methyl-guanosine with phosphorothioate linkage
  modified_base 22: mod_base = OTHER; note = 2'-O-methyl-guanosine
tgctcagtcggtgcttgttcgg

SEQ ID NO: 615 - RNA, 22 nt, synthetic construct
  source 1..22: mol_type = other RNA
  modified_base 1: mod_base = OTHER; note = 2'-O-methyl-uridine with phosphorothioate linkage
  modified_base 2: mod_base = OTHER; note = 2'-fluoro-guanosine with phosphorothioate linkage
  modified_base 3: mod_base = OTHER; note = 2'-fluoro-adenosine
  modified_base 4: mod_base = OTHER; note = 2'-O-methyl-guanosine
  modified_base 5: mod_base = OTHER; note = 2'-fluoro-adenosine
  modified_base 6: mod_base = OTHER; note = 2'-O-methyl-adenosine
  modified_base 7: mod_base = OTHER; note = 2'-fluoro-uridine
  modified_base 8: mod_base = OTHER; note = 2'-O-methyl-guanosine
  modified_base 9: mod_base = OTHER; note = 2'-O-methyl-adenosine
  modified_base 10: mod_base = OTHER; note = 2'-fluoro-guanosine
  modified_base 11: mod_base = OTHER; note = 2'-O-methyl-cytidine
  modified_base 12: mod_base = OTHER; note = 2'-O-methyl-cytidine
  modified_base 13: mod_base = OTHER; note = 2'-O-methyl-uridine
  modified_base 14: mod_base = OTHER; note = 2'-fluoro-cytidine
  modified_base 15: mod_base = OTHER; note = 2'-O-methyl-guanosine
  modified_base 16: mod_base = OTHER; note = 2'-fluoro-adenosine
  modified_base 17: mod_base = OTHER; note = 2'-O-methyl-uridine
  modified_base 18: mod_base = OTHER; note = 2'-O-methyl-adenosine
  modified_base 19: mod_base = OTHER; note = 2'-O-methyl-adenosine
  modified_base 20: mod_base = OTHER; note = 2'-O-methyl-cytidine with phosphorothioate linkage
  modified_base 21: mod_base = OTHER; note = 2'-O-methyl-uridine with phosphorothioate linkage
  modified_base 22: mod_base = OTHER; note = 2'-O-methyl-cytidine
tgagaatgagcctcgataactc

SEQ ID NO: 616 - RNA, 22 nt, synthetic construct
  source 1..22: mol_type = other RNA
  modified_base 1: mod_base = OTHER; note = 2'-O-methyl-uridine with phosphorothioate linkage
  modified_base 2: mod_base = OTHER; note = 2'-fluoro-uridine with phosphorothioate linkage
  modified_base 3: mod_base = OTHER; note = 2'-fluoro-uridine
  modified_base 4: mod_base = OTHER; note = 2'-O-methyl-guanosine
  modified_base 5: mod_base = OTHER; note = 2'-fluoro-cytidine
  modified_base 6: mod_base = OTHER; note = 2'-O-methyl-adenosine
  modified_base 7: mod_base = OTHER; note = 2'-fluoro-adenosine
  modified_base 8: mod_base = OTHER; note = 2'-O-methyl-guanosine
  modified_base 9: mod_base = OTHER; note = 2'-O-methyl-guanosine
  modified_base 10: mod_base = OTHER; note = 2'-fluoro-adenosine
  modified_base 11: mod_base = OTHER; note = 2'-O-methyl-cytidine
  modified_base 12: mod_base = OTHER; note = 2'-O-methyl-adenosine
  modified_base 13: mod_base = OTHER; note = 2'-O-methyl-cytidine
  modified_base 14: mod_base = OTHER; note = 2'-fluoro-uridine
  modified_base 15: mod_base = OTHER; note = 2'-O-methyl-uridine
  modified_base 16: mod_base = OTHER; note = 2'-fluoro-guanosine
  modified_base 17: mod_base = OTHER; note = 2'-O-methyl-adenosine
  modified_base 18: mod_base = OTHER; note = 2'-O-methyl-uridine
  modified_base 19: mod_base = OTHER; note = 2'-O-methyl-uridine
  modified_base 20: mod_base = OTHER; note = 2'-O-methyl-cytidine with phosphorothioate linkage
  modified_base 21: mod_base = OTHER; note = 2'-O-methyl-uridine with phosphorothioate linkage
  modified_base 22: mod_base = OTHER; note = 2'-O-methyl-guanosine
tttgcaaggacacttgattctg

SEQ ID NO: 617 - RNA, 22 nt, synthetic construct
  source 1..22: mol_type = other RNA
  modified_base 1: mod_base = OTHER; note = 2'-O-methyl-uridine with phosphorothioate linkage
  modified_base 2: mod_base = OTHER; note = 2'-fluoro-uridine with phosphorothioate linkage
  modified_base 3: mod_base = OTHER; note = 2'-fluoro-guanosine
  modified_base 4: mod_base = OTHER; note = 2'-O-methyl-cytidine
  modified_base 5: mod_base = OTHER; note = 2'-fluoro-adenosine
  modified_base 6: mod_base = OTHER; note = 2'-O-methyl-guanosine
  modified_base 7: mod_base = OTHER; note = 2'-fluoro-uridine
  modified_base 8: mod_base = OTHER; note = 2'-O-methyl-adenosine
  modified_base 9: mod_base = OTHER; note = 2'-O-methyl-cytidine
  modified_base 10: mod_base = OTHER; note = 2'-fluoro-uridine
  modified_base 11: mod_base = OTHER; note = 2'-O-methyl-cytidine
  modified_base 12: mod_base = OTHER; note = 2'-O-methyl-cytidine
  modified_base 13: mod_base = OTHER; note = 2'-O-methyl-cytidine
  modified_base 14: mod_base = OTHER; note = 2'-fluoro-adenosine
  modified_base 15: mod_base = OTHER; note = 2'-O-methyl-uridine
  modified_base 16: mod_base = OTHER; note = 2'-fluoro-cytidine
  modified_base 17: mod_base = OTHER; note = 2'-O-methyl-uridine
  modified_base 18: mod_base = OTHER; note = 2'-O-methyl-guanosine
  modified_base 19: mod_base = OTHER; note = 2'-O-methyl-adenosine
  modified_base 20: mod_base = OTHER; note = 2'-O-methyl-cytidine with phosphorothioate linkage
  modified_base 21: mod_base = OTHER; note = 2'-O-methyl-adenosine with phosphorothioate linkage
  modified_base 22: mod_base = OTHER; note = 2'-O-methyl-cytidine
ttgcagtactcccatctgacac

SEQ ID NO: 618 - RNA, 22 nt, synthetic construct
  source 1..22: mol_type = other RNA
  modified_base 1: mod_base = OTHER; note = 2'-O-methyl-uridine with phosphorothioate linkage
  modified_base 2: mod_base = OTHER; note = 2'-fluoro-adenosine with phosphorothioate linkage
  modified_base 3: mod_base = OTHER; note = 2'-fluoro-cytidine
  modified_base 4: mod_base = OTHER; note = 2'-O-methyl-adenosine
  modified_base 5: mod_base = OTHER; note = 2'-fluoro-guanosine
  modified_base 6: mod_base = OTHER; note = 2'-O-methyl-uridine
  modified_base 7: mod_base = OTHER; note = 2'-fluoro-guanosine
  modified_base 8: mod_base = OTHER; note = 2'-O-methyl-guanosine
  modified_base 9: mod_base = OTHER; note = 2'-O-methyl-uridine
  modified_base 10: mod_base = OTHER; note = 2'-fluoro-guanosine
  modified_base 11: mod_base = OTHER; note = 2'-O-methyl-guanosine
  modified_base 12: mod_base = OTHER; note = 2'-O-methyl-adenosine
  modified_base 13: mod_base = OTHER; note = 2'-O-methyl-guanosine
  modified_base 14: mod_base = OTHER; note = 2'-fluoro-adenosine
  modified_base 15: mod_base = OTHER; note = 2'-O-methyl-adenosine
  modified_base 16: mod_base = OTHER; note = 2'-fluoro-uridine
  modified_base 17: mod_base = OTHER; note = 2'-O-methyl-guanosine
  modified_base 18: mod_base = OTHER; note = 2'-O-methyl-uridine
  modified_base 19: mod_base = OTHER; note = 2'-O-methyl-guanosine
  modified_base 20: mod_base = OTHER; note = 2'-O-methyl-cytidine with phosphorothioate linkage
  modified_base 21: mod_base = OTHER; note = 2'-O-methyl-cytidine with phosphorothioate linkage
  modified_base 22: mod_base = OTHER; note = 2'-O-methyl-uridine
tacagtggtggagaatgtgcct

SEQ ID NO: 619 - RNA, 22 nt, synthetic construct
  source 1..22: mol_type = other RNA
  modified_base 1: mod_base = OTHER; note = 2'-O-methyl-uridine with phosphorothioate linkage
  modified_base 2: mod_base = OTHER; note = 2'-fluoro-adenosine with phosphorothioate linkage
  modified_base 3: mod_base = OTHER; note = 2'-fluoro-uridine
  modified_base 4: mod_base = OTHER; note = 2'-O-methyl-adenosine
  modified_base 5: mod_base = OTHER; note = 2'-fluoro-guanosine
  modified_base 6: mod_base = OTHER; note = 2'-O-methyl-adenosine
  modified_base 7: mod_base = OTHER; note = 2'-fluoro-uridine
  modified_base 8: mod_base = OTHER; note = 2'-O-methyl-guanosine
  modified_base 9: mod_base = OTHER; note = 2'-O-methyl-adenosine
  modified_base 10: mod_base = OTHER; note = 2'-fluoro-cytidine
  modified_base 11: mod_base = OTHER; note = 2'-O-methyl-cytidine
  modified_base 12: mod_base = OTHER; note = 2'-O-methyl-adenosine
  modified_base 13: mod_base = OTHER; note = 2'-O-methyl-adenosine
  modified_base 14: mod_base = OTHER; note = 2'-fluoro-guanosine
  modified_base 15: mod_base = OTHER; note = 2'-O-methyl-cytidine
  modified_base 16: mod_base = OTHER; note = 2'-fluoro-uridine
  modified_base 17: mod_base = OTHER; note = 2'-O-methyl-uridine
  modified_base 18: mod_base = OTHER; note = 2'-O-methyl-guanosine
  modified_base 19: mod_base = OTHER; note = 2'-O-methyl-guanosine
  modified_base 20: mod_base = OTHER; note = 2'-O-methyl-cytidine with phosphorothioate linkage
  modified_base 21: mod_base = OTHER; note = 2'-O-methyl-adenosine with phosphorothioate linkage
  modified_base 22: mod_base = OTHER; note = 2'-O-methyl-guanosine
tatagatgaccaagcttggcag

SEQ ID NO: 620 - RNA, 22 nt, synthetic construct
  source 1..22: mol_type = other RNA
  modified_base 1: mod_base = OTHER; note = 2'-O-methyl-uridine with phosphorothioate linkage
  modified_base 2: mod_base = OTHER; note = 2'-fluoro-adenosine with phosphorothioate linkage
  modified_base 3: mod_base = OTHER; note = 2'-fluoro-uridine
  modified_base 4: mod_base = OTHER; note = 2'-O-methyl-uridine
  modified_base 5: mod_base = OTHER; note = 2'-fluoro-guanosine
  modified_base 6: mod_base = OTHER; note = 2'-O-methyl-uridine
  modified_base 7: mod_base = OTHER; note = 2'-fluoro-guanosine
  modified_base 8: mod_base = OTHER; note = 2'-O-methyl-uridine
  modified_base 9: mod_base = OTHER; note = 2'-O-methyl-cytidine
  modified_base 10: mod_base = OTHER; note = 2'-fluoro-adenosine
  modified_base 11: mod_base = OTHER; note = 2'-O-methyl-guanosine
  modified_base 12: mod_base = OTHER; note = 2'-O-methyl-guanosine
  modified_base 13: mod_base = OTHER; note = 2'-O-methyl-uridine
  modified_base 14: mod_base = OTHER; note = 2'-fluoro-uridine
  modified_base 15: mod_base = OTHER; note = 2'-O-methyl-guanosine
  modified_base 16: mod_base = OTHER; note = 2'-fluoro-cytidine
  modified_base 17: mod_base = OTHER; note = 2'-O-methyl-adenosine
  modified_base 18: mod_base = OTHER; note = 2'-O-methyl-guanosine
  modified_base 19: mod_base = OTHER; note = 2'-O-methyl-uridine
  modified_base 20: mod_base = OTHER; note = 2'-O-methyl-adenosine with phosphorothioate linkage
  modified_base 21: mod_base = OTHER; note = 2'-O-methyl-cytidine with phosphorothioate linkage
  modified_base 22: mod_base = OTHER; note = 2'-O-methyl-uridine
tattgtgtcaggttgcagtact

SEQ ID NO: 621 - RNA, 22 nt, synthetic construct
  source 1..22: mol_type = other RNA
  modified_base 1: mod_base = OTHER; note = 2'-O-methyl-uridine with phosphorothioate linkage
  modified_base 2: mod_base = OTHER; note = 2'-fluoro-guanosine with phosphorothioate linkage
  modified_base 3: mod_base = OTHER; note = 2'-fluoro-uridine
  modified_base 4: mod_base = OTHER; note = 2'-O-methyl-cytidine
  modified_base 5: mod_base = OTHER; note = 2'-fluoro-cytidine
  modified_base 6: mod_base = OTHER; note = 2'-O-methyl-adenosine
  modified_base 7: mod_base = OTHER; note = 2'-fluoro-uridine
  modified_base 8: mod_base = OTHER; note = 2'-O-methyl-cytidine
  modified_base 9: mod_base = OTHER; note = 2'-O-methyl-adenosine
  modified_base 10: mod_base = OTHER; note = 2'-fluoro-cytidine
  modified_base 11: mod_base = OTHER; note = 2'-O-methyl-cytidine
  modified_base 12: mod_base = OTHER; note = 2'-O-methyl-adenosine
  modified_base 13: mod_base = OTHER; note = 2'-O-methyl-uridine
  modified_base 14: mod_base = OTHER; note = 2'-fluoro-guanosine
  modified_base 15: mod_base = OTHER; note = 2'-O-methyl-guanosine
  modified_base 16: mod_base = OTHER; note = 2'-fluoro-uridine
  modified_base 17: mod_base = OTHER; note = 2'-O-methyl-adenosine
  modified_base 18: mod_base = OTHER; note = 2'-O-methyl-guanosine
  modified_base 19: mod_base = OTHER; note = 2'-O-methyl-cytidine
  modified_base 20: mod_base = OTHER; note = 2'-O-methyl-adenosine with phosphorothioate linkage
  modified_base 21: mod_base = OTHER; note = 2'-O-methyl-adenosine with phosphorothioate linkage
  modified_base 22: mod_base = OTHER; note = 2'-O-methyl-uridine
tgtccatcaccatggtagcaat

SEQ ID NO: 622 - RNA, 22 nt, synthetic construct
  source 1..22: mol_type = other RNA
  modified_base 1: mod_base = OTHER; note = 2'-O-methyl-uridine with phosphorothioate linkage
  modified_base 2: mod_base = OTHER; note = 2'-fluoro-uridine with phosphorothioate linkage
  modified_base 3: mod_base = OTHER; note = 2'-fluoro-guanosine
  modified_base 4: mod_base = OTHER; note = 2'-O-methyl-guanosine
  modified_base 5: mod_base = OTHER; note = 2'-fluoro-uridine
  modified_base 6: mod_base = OTHER; note = 2'-O-methyl-guanosine
  modified_base 7: mod_base = OTHER; note = 2'-fluoro-uridine
  modified_base 8: mod_base = OTHER; note = 2'-O-methyl-cytidine
  modified_base 9: mod_base = OTHER; note = 2'-O-methyl-adenosine
  modified_base 10: mod_base = OTHER; note = 2'-fluoro-uridine
  modified_base 11: mod_base = OTHER; note = 2'-O-methyl-guanosine
  modified_base 12: mod_base = OTHER; note = 2'-O-methyl-guanosine
  modified_base 13: mod_base = OTHER; note = 2'-O-methyl-adenosine
  modified_base 14: mod_base = OTHER; note = 2'-fluoro-uridine
  modified_base 15: mod_base = OTHER; note = 2'-O-methyl-guanosine
  modified_base 16: mod_base = OTHER; note = 2'-fluoro-adenosine
  modified_base 17: mod_base = OTHER; note = 2'-O-methyl-cytidine
  modified_base 18: mod_base = OTHER; note = 2'-O-methyl-cytidine
  modified_base 19: mod_base = OTHER; note = 2'-O-methyl-adenosine
  modified_base 20: mod_base = OTHER; note = 2'-O-methyl-adenosine with phosphorothioate linkage
  modified_base 21: mod_base = OTHER; note = 2'-O-methyl-guanosine with phosphorothioate linkage
  modified_base 22: mod_base = OTHER; note = 2'-O-methyl-adenosine
ttggtgtcatggatgaccaaga

SEQ ID NO: 623 - RNA, 22 nt, synthetic construct
  source 1..22: mol_type = other RNA
  modified_base 1: mod_base = OTHER; note = 2'-O-methyl-uridine with phosphorothioate linkage
  modified_base 2: mod_base = OTHER; note = 2'-fluoro-adenosine with phosphorothioate linkage
  modified_base 3: mod_base = OTHER; note = 2'-fluoro-uridine
  modified_base 4: mod_base = OTHER; note = 2'-O-methyl-cytidine
  modified_base 5: mod_base = OTHER; note = 2'-fluoro-adenosine
  modified_base 6: mod_base = OTHER; note = 2'-O-methyl-adenosine
  modified_base 7: mod_base = OTHER; note = 2'-fluoro-guanosine
  modified_base 8: mod_base = OTHER; note = 2'-O-methyl-cytidine
  modified_base 9: mod_base = OTHER; note = 2'-O-methyl-cytidine
  modified_base 10: mod_base = OTHER; note = 2'-fluoro-adenosine
  modified_base 11: mod_base = OTHER; note = 2'-O-methyl-guanosine
  modified_base 12: mod_base = OTHER; note = 2'-O-methyl-cytidine
  modified_base 13: mod_base = OTHER; note = 2'-O-methyl-adenosine
  modified_base 14: mod_base = OTHER; note = 2'-fluoro-uridine
  modified_base 15: mod_base = OTHER; note = 2'-O-methyl-uridine
  modified_base 16: mod_base = OTHER; note = 2'-fluoro-uridine
  modified_base 17: mod_base = OTHER; note = 2'-O-methyl-guanosine
  modified_base 18: mod_base = OTHER; note = 2'-O-methyl-guanosine
  modified_base 19: mod_base = OTHER; note = 2'-O-methyl-guanosine
  modified_base 20: mod_base = OTHER; note = 2'-O-methyl-uridine with phosphorothioate linkage
  modified_base 21: mod_base = OTHER; note = 2'-O-methyl-adenosine with phosphorothioate linkage
  modified_base 22: mod_base = OTHER; note = 2'-O-methyl-guanosine
tatcaagccagcatttgggtag

SEQ ID NO: 624 - RNA, 22 nt, synthetic construct
  source 1..22: mol_type = other RNA
  modified_base 1: mod_base = OTHER; note = 2'-O-methyl-uridine with phosphorothioate linkage
  modified_base 2: mod_base = OTHER; note = 2'-fluoro-cytidine with phosphorothioate linkage
  modified_base 3: mod_base = OTHER; note = 2'-fluoro-adenosine
  modified_base 4: mod_base = OTHER; note = 2'-O-methyl-cytidine
  modified_base 5: mod_base = OTHER; note = 2'-fluoro-cytidine
  modified_base 6: mod_base = OTHER; note = 2'-O-methyl-adenosine
  modified_base 7: mod_base = OTHER; note = 2'-fluoro-uridine
  modified_base 8: mod_base = OTHER; note = 2'-O-methyl-guanosine
  modified_base 9: mod_base = OTHER; note = 2'-O-methyl-guanosine
  modified_base 10: mod_base = OTHER; note = 2'-fluoro-uridine
  modified_base 11: mod_base = OTHER; note = 2'-O-methyl-adenosine
  modified_base 12: mod_base = OTHER; note = 2'-O-methyl-guanosine
  modified_base 13: mod_base = OTHER; note = 2'-O-methyl-cytidine
  modified_base 14: mod_base = OTHER; note = 2'-fluoro-adenosine
  modified_base 15: mod_base = OTHER; note = 2'-O-methyl-adenosine
  modified_base 16: mod_base = OTHER; note = 2'-fluoro-uridine
  modified_base 17: mod_base = OTHER; note = 2'-O-methyl-cytidine
  modified_base 18: mod_base = OTHER; note = 2'-O-methyl-cytidine
  modified_base 19: mod_base = OTHER; note = 2'-O-methyl-uridine
  modified_base 20: mod_base = OTHER; note = 2'-O-methyl-guanosine with phosphorothioate linkage
  modified_base 21: mod_base = OTHER; note = 2'-O-methyl-guanosine with phosphorothioate linkage
  modified_base 22: mod_base = OTHER; note = 2'-O-methyl-adenosine
tcaccatggtagcaatcctgga

SEQ ID NO: 625 - RNA, 22 nt, synthetic construct
  source 1..22: mol_type = other RNA
  modified_base 1: mod_base = OTHER; note = 2'-O-methyl-uridine with phosphorothioate linkage
  modified_base 2: mod_base = OTHER; note = 2'-fluoro-adenosine with phosphorothioate linkage
  modified_base 3: mod_base = OTHER; note = 2'-fluoro-guanosine
  modified_base 4: mod_base = OTHER; note = 2'-O-methyl-uridine
  modified_base 5: mod_base = OTHER; note = 2'-fluoro-adenosine
  modified_base 6: mod_base = OTHER; note = 2'-O-methyl-guanosine
  modified_base 7: mod_base = OTHER; note = 2'-fluoro-uridine
  modified_base 8: mod_base = OTHER; note = 2'-O-methyl-uridine
  modified_base 9: mod_base = OTHER; note = 2'-O-methyl-cytidine
  modified_base 10: mod_base = OTHER; note = 2'-fluoro-cytidine
  modified_base 11: mod_base = OTHER; note = 2'-O-methyl-uridine
  modified_base 12: mod_base = OTHER; note = 2'-O-methyl-guanosine
  modified_base 13: mod_base = OTHER; note = 2'-O-methyl-guanosine
  modified_base 14: mod_base = OTHER; note = 2'-fluoro-uridine
  modified_base 15: mod_base = OTHER; note = 2'-O-methyl-cytidine
  modified_base 16: mod_base = OTHER; note = 2'-fluoro-adenosine
  modified_base 17: mod_base = OTHER; note = 2'-O-methyl-guanosine
  modified_base 18: mod_base = OTHER; note = 2'-O-methyl-guanosine
  modified_base 19: mod_base = OTHER; note = 2'-O-methyl-cytidine
  modified_base 20: mod_base = OTHER; note = 2'-O-methyl-cytidine with phosphorothioate linkage
  modified_base 21: mod_base = OTHER; note = 2'-O-methyl-adenosine with phosphorothioate linkage
  modified_base 22: mod_base = OTHER; note = 2'-O-methyl-cytidine
tagtagttcctggtcaggccac

SEQ ID NO: 626 - RNA, 22 nt, synthetic construct
  source 1..22: mol_type = other RNA
  modified_base 1: mod_base = OTHER; note = 2'-O-methyl-uridine with phosphorothioate linkage
  modified_base 2: mod_base = OTHER; note = 2'-fluoro-cytidine with phosphorothioate linkage
  modified_base 3: mod_base = OTHER; note = 2'-fluoro-cytidine
  modified_base 4: mod_base = OTHER; note = 2'-O-methyl-adenosine
  modified_base 5: mod_base = OTHER; note = 2'-fluoro-adenosine
  modified_base 6: mod_base = OTHER; note = 2'-O-methyl-guanosine
  modified_base 7: mod_base = OTHER; note = 2'-fluoro-cytidine
  modified_base 8: mod_base = OTHER; note = 2'-O-methyl-uridine
  modified_base 9: mod_base = OTHER; note = 2'-O-methyl-uridine
  modified_base 10: mod_base = OTHER; note = 2'-fluoro-guanosine
  modified_base 11: mod_base = OTHER; note = 2'-O-methyl-guanosine
  modified_base 12: mod_base = OTHER; note = 2'-O-methyl-cytidine
  modified_base 13: mod_base = OTHER; note = 2'-O-methyl-adenosine
  modified_base 14: mod_base = OTHER; note = 2'-fluoro-guanosine
  modified_base 15: mod_base = OTHER; note = 2'-O-methyl-guanosine
  modified_base 16: mod_base = OTHER; note = 2'-fluoro-uridine
  modified_base 17: mod_base = OTHER; note = 2'-O-methyl-cytidine
  modified_base 18: mod_base = OTHER; note = 2'-O-methyl-cytidine
  modified_base 19: mod_base = OTHER; note = 2'-O-methyl-uridine
  modified_base 20: mod_base = OTHER; note = 2'-O-methyl-uridine with phosphorothioate linkage
  modified_base 21: mod_base = OTHER; note = 2'-O-methyl-cytidine with phosphorothioate linkage
  modified_base 22: mod_base = OTHER; note = 2'-O-methyl-cytidine
tccaagcttggcaggtccttcc

SEQ ID NO: 627 - RNA, 22 nt, synthetic construct
  source 1..22: mol_type = other RNA
  modified_base 1: mod_base = OTHER; note = 2'-O-methyl-uridine with phosphorothioate linkage
  modified_base 2: mod_base = OTHER; note = 2'-fluoro-adenosine with phosphorothioate linkage
  modified_base 3: mod_base = OTHER; note = 2'-fluoro-guanosine
  modified_base 4: mod_base = OTHER; note = 2'-O-methyl-uridine
  modified_base 5: mod_base = OTHER; note = 2'-fluoro-cytidine
  modified_base 6: mod_base = OTHER; note = 2'-O-methyl-guanosine
  modified_base 7: mod_base = OTHER; note = 2'-fluoro-guanosine
  modified_base 8: mod_base = OTHER; note = 2'-O-methyl-uridine
  modified_base 9: mod_base = OTHER; note = 2'-O-methyl-guanosine
  modified_base 10: mod_base = OTHER; note = 2'-fluoro-cytidine
  modified_base 11: mod_base = OTHER; note = 2'-O-methyl-uridine
  modified_base 12: mod_base = OTHER; note = 2'-O-methyl-uridine
  modified_base 13: mod_base = OTHER; note = 2'-O-methyl-guanosine
  modified_base 14: mod_base = OTHER; note = 2'-fluoro-uridine
  modified_base 15: mod_base = OTHER; note = 2'-O-methyl-uridine
  modified_base 16: mod_base = OTHER; note = 2'-fluoro-cytidine
  modified_base 17: mod_base = OTHER; note = 2'-O-methyl-guanosine
  modified_base 18: mod_base = OTHER; note = 2'-O-methyl-guanosine
  modified_base 19: mod_base = OTHER; note = 2'-O-methyl-adenosine
  modified_base 20: mod_base = OTHER; note = 2'-O-methyl-adenosine with phosphorothioate linkage
  modified_base 21: mod_base = OTHER; note = 2'-O-methyl-guanosine with phosphorothioate linkage
  modified_base 22: mod_base = OTHER; note = 2'-O-methyl-guanosine
tagtcggtgcttgttcggaagg

SEQ ID NO: 628 - RNA, 22 nt, synthetic construct
  source 1..22: mol_type = other RNA
  modified_base 1: mod_base = OTHER; note = 2'-O-methyl-uridine with phosphorothioate linkage
  modified_base 2: mod_base = OTHER; note = 2'-fluoro-cytidine with phosphorothioate linkage
  modified_base 3: mod_base = OTHER; note = 2'-fluoro-guanosine
  modified_base 4: mod_base = OTHER; note = 2'-O-methyl-uridine
  modified_base 5: mod_base = OTHER; note = 2'-fluoro-cytidine
  modified_base 6: mod_base = OTHER; note = 2'-O-methyl-adenosine
  modified_base 7: mod_base = OTHER; note = 2'-fluoro-guanosine
  modified_base 8: mod_base = OTHER; note = 2'-O-methyl-guanosine
  modified_base 9: mod_base = OTHER; note = 2'-O-methyl-uridine
  modified_base 10: mod_base = OTHER; note = 2'-fluoro-uridine
  modified_base 11: mod_base = OTHER; note = 2'-O-methyl-guanosine
  modified_base 12: mod_base = OTHER; note = 2'-O-methyl-cytidine
  modified_base 13: mod_base = OTHER; note = 2'-O-methyl-adenosine
  modified_base 14: mod_base = OTHER; note = 2'-fluoro-guanosine
  modified_base 15: mod_base = OTHER; note = 2'-O-methyl-uridine
  modified_base 16: mod_base = OTHER; note = 2'-fluoro-adenosine
  modified_base 17: mod_base = OTHER; note = 2'-O-methyl-cytidine
  modified_base 18: mod_base = OTHER; note = 2'-O-methyl-uridine
  modified_base 19: mod_base = OTHER; note = 2'-O-methyl-cytidine
  modified_base 20: mod_base = OTHER; note = 2'-O-methyl-cytidine with phosphorothioate linkage
  modified_base 21: mod_base = OTHER; note = 2'-O-methyl-cytidine with phosphorothioate linkage
  modified_base 22: mod_base = OTHER; note = 2'-O-methyl-adenosine
tcgtcaggttgcagtactccca

SEQ ID NO: 629 - RNA, 22 nt, synthetic construct
  source 1..22: mol_type = other RNA
  modified_base 1: mod_base = OTHER; note = 2'-O-methyl-uridine with phosphorothioate linkage
  modified_base 2: mod_base = OTHER; note = 2'-fluoro-adenosine with phosphorothioate linkage
  modified_base 3: mod_base = OTHER; note = 2'-fluoro-cytidine
  modified_base 4: mod_base = OTHER; note = 2'-O-methyl-uridine
  modified_base 5: mod_base = OTHER; note = 2'-fluoro-guanosine
  modified_base 6: mod_base = OTHER; note = 2'-O-methyl-adenosine
  modified_base 7: mod_base = OTHER; note = 2'-fluoro-cytidine
  modified_base 8: mod_base = OTHER; note = 2'-O-methyl-adenosine
  modified_base 9: mod_base = OTHER; note = 2'-O-methyl-uridine
  modified_base 10: mod_base = OTHER; note = 2'-fluoro-guanosine
  modified_base 11: mod_base = OTHER; note = 2'-O-methyl-uridine
  modified_base 12: mod_base = OTHER; note = 2'-O-methyl-cytidine
  modified_base 13: mod_base = OTHER; note = 2'-O-methyl-cytidine
  modified_base 14: mod_base = OTHER; note = 2'-fluoro-uridine
  modified_base 15: mod_base = OTHER; note = 2'-O-methyl-uridine
  modified_base 16: mod_base = OTHER; note = 2'-fluoro-cytidine
  modified_base 17: mod_base = OTHER; note = 2'-O-methyl-cytidine
  modified_base 18: mod_base = OTHER; note = 2'-O-methyl-uridine
  modified_base 19: mod_base = OTHER; note = 2'-O-methyl-guanosine
  modified_base 20: mod_base = OTHER; note = 2'-O-methyl-uridine with phosphorothioate linkage
  modified_base 21: mod_base = OTHER; note = 2'-O-methyl-adenosine with phosphorothioate linkage
  modified_base 22: mod_base = OTHER; note = 2'-O-methyl-adenosine
tactgacatgtccttcctgtaa

SEQ ID NO: 630 - RNA, 22 nt, synthetic construct
  source 1..22: mol_type = other RNA
  modified_base 1: mod_base = OTHER; note = 2'-O-methyl-uridine with phosphorothioate linkage
  modified_base 2: mod_base = OTHER; note = 2'-fluoro-uridine with phosphorothioate linkage
  modified_base 3: mod_base = OTHER; note = 2'-fluoro-uridine
  modified_base 4: mod_base = OTHER; note = 2'-O-methyl-uridine
  modified_base 5: mod_base = OTHER; note = 2'-fluoro-uridine
  modified_base 6: mod_base = OTHER; note = 2'-O-methyl-cytidine
  modified_base 7: mod_base = OTHER; note = 2'-fluoro-uridine
  modified_base 8: mod_base = OTHER; note = 2'-O-methyl-cytidine
  modified_base 9: mod_base = OTHER; note = 2'-O-methyl-adenosine
  modified_base 10: mod_base = OTHER; note = 2'-fluoro-guanosine
  modified_base 11: mod_base = OTHER; note = 2'-O-methyl-guanosine
  modified_base 12: mod_base = OTHER; note = 2'-O-methyl-uridine
  modified_base 13: mod_base = OTHER; note = 2'-O-methyl-guanosine
  modified_base 14: mod_base = OTHER; note = 2'-fluoro-guanosine
  modified_base 15: mod_base = OTHER; note = 2'-O-methyl-uridine
  modified_base 16: mod_base = OTHER; note = 2'-fluoro-guanosine
  modified_base 17: mod_base = OTHER; note = 2'-O-methyl-cytidine
  modified_base 18: mod_base = OTHER; note = 2'-O-methyl-uridine
  modified_base 19: mod_base = OTHER; note = 2'-O-methyl-uridine
  modified_base 20: mod_base = OTHER; note = 2'-O-methyl-guanosine with phosphorothioate linkage
  modified_base 21: mod_base = OTHER; note = 2'-O-methyl-uridine with phosphorothioate linkage
  modified_base 22: mod_base = OTHER; note = 2'-O-methyl-uridine
tttttctcaggtggtgcttgtt

SEQ ID NO: 631 - RNA, 22 nt, synthetic construct
  source 1..22: mol_type = other RNA
  modified_base 1: mod_base = OTHER; note = 2'-O-methyl-uridine with phosphorothioate linkage
  modified_base 2: mod_base = OTHER; note = 2'-fluoro-cytidine with phosphorothioate linkage
  modified_base 3: mod_base = OTHER; note = 2'-fluoro-uridine
  modified_base 4: mod_base = OTHER; note = 2'-O-methyl-guanosine
  modified_base 5: mod_base = OTHER; note = 2'-fluoro-cytidine
  modified_base 6: mod_base = OTHER; note = 2'-O-methyl-guanosine
  modified_base 7: mod_base = OTHER; note = 2'-fluoro-uridine
  modified_base 8: mod_base = OTHER; note = 2'-O-methyl-cytidine
  modified_base 9: mod_base = OTHER; note = 2'-O-methyl-uridine
  modified_base 10: mod_base = OTHER; note = 2'-fluoro-guanosine
  modified_base 11: mod_base = OTHER; note = 2'-O-methyl-adenosine
  modified_base 12: mod_base = OTHER; note = 2'-O-methyl-guanosine
  modified_base 13: mod_base = OTHER; note = 2'-O-methyl-cytidine
  modified_base 14: mod_base = OTHER; note = 2'-fluoro-adenosine
  modified_base 15: mod_base = OTHER; note = 2'-O-methyl-uridine
  modified_base 16: mod_base = OTHER; note = 2'-fluoro-uridine
  modified_base 17: mod_base = OTHER; note = 2'-O-methyl-guanosine
  modified_base 18: mod_base = OTHER; note = 2'-O-methyl-uridine
  modified_base 19: mod_base = OTHER; note = 2'-O-methyl-guanosine
  modified_base 20: mod_base = OTHER; note = 2'-O-methyl-uridine with phosphorothioate linkage
  modified_base 21: mod_base = OTHER; note = 2'-O-methyl-cytidine with phosphorothioate linkage
  modified_base 22: mod_base = OTHER; note = 2'-O-methyl-adenosine
tctgcgtctgagcattgtgtca

SEQ ID NO: 632 - RNA, 22 nt, synthetic construct
  source 1..22: mol_type = other RNA
  modified_base 1: mod_base = OTHER; note = 2'-O-methyl-uridine with phosphorothioate linkage
  modified_base 2: mod_base = OTHER; note = 2'-fluoro-adenosine with phosphorothioate linkage
  modified_base 3: mod_base = OTHER; note = 2'-fluoro-adenosine
  modified_base 4: mod_base = OTHER; note = 2'-O-methyl-guanosine
  modified_base 5: mod_base = OTHER; note = 2'-fluoro-adenosine
  modified_base 6: mod_base = OTHER; note = 2'-O-methyl-cytidine
  modified_base 7: mod_base = OTHER; note = 2'-fluoro-uridine
  modified_base 8: mod_base = OTHER; note = 2'-O-methyl-guanosine
  modified_base 9: mod_base = OTHER; note = 2'-O-methyl-adenosine
  modified_base 10: mod_base = OTHER; note = 2'-fluoro-cytidine
  modified_base 11: mod_base = OTHER; note = 2'-O-methyl-adenosine
  modified_base 12: mod_base = OTHER; note = 2'-O-methyl-uridine
  modified_base 13: mod_base = OTHER; note = 2'-O-methyl-guanosine
  modified_base 14: mod_base = OTHER; note = 2'-fluoro-uridine
  modified_base 15: mod_base = OTHER; note = 2'-O-methyl-cytidine
  modified_base 16: mod_base = OTHER; note = 2'-fluoro-cytidine
  modified_base 17: mod_base = OTHER; note = 2'-O-methyl-uridine
  modified_base 18: mod_base = OTHER; note = 2'-O-methyl-uridine
  modified_base 19: mod_base = OTHER; note = 2'-O-methyl-cytidine
  modified_base 20: mod_base = OTHER; note = 2'-O-methyl-cytidine with phosphorothioate linkage
  modified_base 21: mod_base = OTHER; note = 2'-O-methyl-uridine with phosphorothioate linkage
  modified_base 22: mod_base = OTHER; note = 2'-O-methyl-guanosine
taagactgacatgtccttcctg

SEQ ID NO: 633 - RNA, 22 nt, synthetic construct
  source 1..22: mol_type = other RNA
  modified_base 1: mod_base = OTHER; note = 2'-O-methyl-uridine with phosphorothioate linkage
  modified_base 2: mod_base = OTHER; note = 2'-fluoro-adenosine with phosphorothioate linkage
  modified_base 3: mod_base = OTHER; note = 2'-fluoro-adenosine
  modified_base 4: mod_base = OTHER; note = 2'-O-methyl-cytidine
  modified_base 5: mod_base = OTHER; note = 2'-fluoro-adenosine
  modified_base 6: mod_base = OTHER; note = 2'-O-methyl-adenosine
  modified_base 7: mod_base = OTHER; note = 2'-fluoro-uridine
  modified_base 8: mod_base = OTHER; note = 2'-O-methyl-adenosine
  modified_base 9: mod_base = OTHER; note = 2'-O-methyl-adenosine
  modified_base 10: mod_base = OTHER; note = 2'-fluoro-guanosine
  modified_base 11: mod_base = OTHER; note = 2'-O-methyl-guanosine
  modified_base 12: mod_base = OTHER; note = 2'-O-methyl-guanosine
  modified_base 13: mod_base = OTHER; note = 2'-O-methyl-guanosine
  modified_base 14: mod_base = OTHER; note = 2'-fluoro-cytidine
  modified_base 15: mod_base = OTHER; note = 2'-O-methyl-uridine
  modified_base 16: mod_base = OTHER; note = 2'-fluoro-guanosine
  modified_base 17: mod_base = OTHER; note = 2'-O-methyl-cytidine
  modified_base 18: mod_base = OTHER; note = 2'-O-methyl-cytidine
  modified_base 19: mod_base = OTHER; note = 2'-O-methyl-adenosine
  modified_base 20: mod_base = OTHER; note = 2'-O-methyl-cytidine with phosphorothioate linkage
  modified_base 21: mod_base = OTHER; note = 2'-O-methyl-adenosine with phosphorothioate linkage
  modified_base 22: mod_base = OTHER; note = 2'-O-methyl-guanosine
taacaataaggggctgccacag

SEQ ID NO: 634 - RNA, 22 nt, synthetic construct
  source 1..22: mol_type = other RNA
  modified_base 1: mod_base = OTHER; note = 2'-O-methyl-uridine with phosphorothioate linkage
  modified_base 2: mod_base = OTHER; note = 2'-fluoro-adenosine with phosphorothioate linkage
  modified_base 3: mod_base = OTHER; note = 2'-fluoro-adenosine
  modified_base 4: mod_base = OTHER; note = 2'-O-methyl-cytidine
  modified_base 5: mod_base = OTHER; note = 2'-fluoro-adenosine
  modified_base 6: mod_base = OTHER; note = 2'-O-methyl-cytidine
  modified_base 7: mod_base = OTHER; note = 2'-fluoro-cytidine
  modified_base 8: mod_base = OTHER; note = 2'-O-methyl-adenosine
  modified_base 9: mod_base = OTHER; note = 2'-O-methyl-adenosine
  modified_base 10: mod_base = OTHER; note = 2'-fluoro-guanosine
  modified_base 11: mod_base = OTHER; note = 2'-O-methyl-guanosine
  modified_base 12: mod_base = OTHER; note = 2'-O-methyl-guanosine
  modified_base 13: mod_base = OTHER; note = 2'-O-methyl-cytidine
  modified_base 14: mod_base = OTHER; note = 2'-fluoro-guanosine
  modified_base 15: mod_base = OTHER; note = 2'-O-methyl-adenosine
  modified_base 16: mod_base = OTHER; note = 2'-fluoro-adenosine
  modified_base 17: mod_base = OTHER; note = 2'-O-methyl-uridine
  modified_base 18: mod_base = OTHER; note = 2'-O-methyl-cytidine
  modified_base 19: mod_base = OTHER; note = 2'-O-methyl-uridine
  modified_base 20: mod_base = OTHER; note = 2'-O-methyl-cytidine with phosphorothioate linkage
  modified_base 21: mod_base = OTHER; note = 2'-O-methyl-adenosine with phosphorothioate linkage
  modified_base 22: mod_base = OTHER; note = 2'-O-methyl-guanosine
taacaccaagggcgaatctcag

SEQ ID NO: 635 - RNA, 22 nt, synthetic construct
  source 1..22: mol_type = other RNA
  modified_base 1: mod_base = OTHER; note = 2'-O-methyl-uridine with phosphorothioate linkage
  modified_base 2: mod_base = OTHER; note = 2'-fluoro-uridine with phosphorothioate linkage
  modified_base 3: mod_base = OTHER; note = 2'-fluoro-guanosine
  modified_base 4: mod_base = OTHER; note = 2'-O-methyl-cytidine
  modified_base 5: mod_base = OTHER; note = 2'-fluoro-adenosine
  modified_base 6: mod_base = OTHER; note = 2'-O-methyl-guanosine
  modified_base 7: mod_base = OTHER; note = 2'-fluoro-uridine
  modified_base 8: mod_base = OTHER; note = 2'-O-methyl-adenosine
  modified_base 9: mod_base = OTHER; note = 2'-O-methyl-cytidine
  modified_base 10: mod_base = OTHER; note = 2'-fluoro-uridine
  modified_base 11: mod_base = OTHER; note = 2'-O-methyl-cytidine
  modified_base 12: mod_base = OTHER; note = 2'-O-methyl-cytidine
  modified_base 13: mod_base = OTHER; note = 2'-O-methyl-cytidine
  modified_base 14: mod_base = OTHER; note = 2'-fluoro-adenosine
  modified_base 15: mod_base = OTHER; note = 2'-O-methyl-uridine
  modified_base 16: mod_base = OTHER; note = 2'-fluoro-cytidine
  modified_base 17: mod_base = OTHER; note = 2'-O-methyl-uridine
  modified_base 18: mod_base = OTHER; note = 2'-O-methyl-guanosine
  modified_base 19: mod_base = OTHER; note = 2'-O-methyl-adenosine
  modified_base 20: mod_base = OTHER; note = 2'-O-methyl-cytidine with phosphorothioate linkage
  modified_base 21: mod_base = OTHER; note = 2'-O-methyl-adenosine with phosphorothioate linkage
  modified_base 22: mod_base = OTHER; note = 2'-O-methyl-uridine
ttgcagtactcccatctgacat

SEQ ID NO: 636 - RNA, 22 nt, synthetic construct
  source 1..22: mol_type = other RNA
  modified_base 1: mod_base = OTHER; note = 2'-O-methyl-uridine with phosphorothioate linkage
  modified_base 2: mod_base = OTHER; note = 2'-fluoro-cytidine with phosphorothioate linkage
  modified_base 3: mod_base = OTHER; note = 2'-fluoro-uridine
  modified_base 4: mod_base = OTHER; note = 2'-O-methyl-guanosine
  modified_base 5: mod_base = OTHER; note = 2'-fluoro-cytidine
  modified_base 6: mod_base = OTHER; note = 2'-O-methyl-adenosine
  modified_base 7: mod_base = OTHER; note = 2'-fluoro-guanosine
  modified_base 8: mod_base = OTHER; note = 2'-O-methyl-uridine
  modified_base 9: mod_base = OTHER; note = 2'-O-methyl-adenosine
  modified_base 10: mod_base = OTHER; note = 2'-fluoro-guanosine
  modified_base 11: mod_base = OTHER; note = 2'-O-methyl-uridine
  modified_base 12: mod_base = OTHER; note = 2'-O-methyl-uridine
  modified_base 13: mod_base = OTHER; note = 2'-O-methyl-cytidine
  modified_base 14: mod_base = OTHER; note = 2'-fluoro-cytidine
  modified_base 15: mod_base = OTHER; note = 2'-O-methyl-uridine
  modified_base 16: mod_base = OTHER; note = 2'-fluoro-guanosine
  modified_base 17: mod_base = OTHER; note = 2'-O-methyl-guanosine
  modified_base 18: mod_base = OTHER; note = 2'-O-methyl-uridine
  modified_base 19: mod_base = OTHER; note = 2'-O-methyl-cytidine
  modified_base 20: mod_base = OTHER; note = 2'-O-methyl-adenosine with phosphorothioate linkage
  modified_base 21: mod_base = OTHER; note = 2'-O-methyl-guanosine with phosphorothioate linkage
  modified_base 22: mod_base = OTHER; note = 2'-O-methyl-guanosine
tctgcagtagttcctggtcagg

SEQ ID NO: 637 - RNA, 22 nt, synthetic construct
  source 1..22: mol_type = other RNA
  modified_base 1: mod_base = OTHER; note = 2'-O-methyl-uridine with phosphorothioate linkage
  modified_base 2: mod_base = OTHER; note = 2'-fluoro-uridine with phosphorothioate linkage
  modified_base 3: mod_base = OTHER; note = 2'-fluoro-cytidine
  modified_base 4: mod_base = OTHER; note = 2'-O-methyl-adenosine
  modified_base 5: mod_base = OTHER; note = 2'-fluoro-guanosine
  modified_base 6: mod_base = OTHER; note = 2'-O-methyl-uridine
  modified_base 7: mod_base = OTHER; note = 2'-fluoro-uridine
  modified_base 8: mod_base = OTHER; note = 2'-O-methyl-guanosine
  modified_base 9: mod_base = OTHER; note = 2'-O-methyl-guanosine
  modified_base 10: mod_base = OTHER; note = 2'-fluoro-uridine
  modified_base 11: mod_base = OTHER; note = 2'-O-methyl-guanosine
  modified_base 12: mod_base = OTHER; note = 2'-O-methyl-cytidine
  modified_base 13: mod_base = OTHER; note = 2'-O-methyl-uridine
  modified_base 14: mod_base = OTHER; note = 2'-fluoro-uridine
  modified_base 15: mod_base = OTHER; note = 2'-O-methyl-cytidine
  modified_base 16: mod_base = OTHER; note = 2'-fluoro-uridine
  modified_base 17: mod_base = OTHER; note = 2'-O-methyl-uridine
  modified_base 18: mod_base = OTHER; note = 2'-O-methyl-cytidine
  modified_base 19: mod_base = OTHER; note = 2'-O-methyl-adenosine
  modified_base 20: mod_base = OTHER; note = 2'-O-methyl-guanosine with phosphorothioate linkage
  modified_base 21: mod_base = OTHER; note = 2'-O-methyl-adenosine with phosphorothioate linkage
  modified_base 22: mod_base = OTHER; note = 2'-O-methyl-adenosine
ttcagttggtgcttcttcagaa

SEQ ID NO: 638 - RNA, 22 nt, synthetic construct
  source 1..22: mol_type = other RNA
  modified_base 1: mod_base = OTHER; note = 2'-O-methyl-uridine with phosphorothioate linkage
  modified_base 2: mod_base = OTHER; note = 2'-fluoro-guanosine with phosphorothioate linkage
  modified_base 3: mod_base = OTHER; note = 2'-fluoro-uridine
  modified_base 4: mod_base = OTHER; note = 2'-O-methyl-adenosine
  modified_base 5: mod_base = OTHER; note = 2'-fluoro-cytidine
  modified_base 6: mod_base = OTHER; note = 2'-O-methyl-uridine
  modified_base 7: mod_base = OTHER; note = 2'-fluoro-cytidine
  modified_base 8: mod_base = OTHER; note = 2'-O-methyl-cytidine
  modified_base 9: mod_base = OTHER; note = 2'-O-methyl-cytidine
  modified_base 10: mod_base = OTHER; note = 2'-fluoro-adenosine
  modified_base 11: mod_base = OTHER; note = 2'-O-methyl-cytidine
  modified_base 12: mod_base = OTHER; note = 2'-O-methyl-cytidine
  modified_base 13: mod_base = OTHER; note = 2'-O-methyl-uridine
  modified_base 14: mod_base = OTHER; note = 2'-fluoro-guanosine
  modified_base 15: mod_base = OTHER; note = 2'-O-methyl-adenosine
  modified_base 16: mod_base = OTHER; note = 2'-fluoro-cytidine
  modified_base 17: mod_base = OTHER; note = 2'-O-methyl-adenosine
  modified_base 18: mod_base = OTHER; note = 2'-O-methyl-cytidine
  modified_base 19: mod_base = OTHER; note = 2'-O-methyl-uridine
  modified_base 20: mod_base = OTHER; note = 2'-O-methyl-guanosine with phosphorothioate linkage
  modified_base 21: mod_base = OTHER; note = 2'-O-methyl-guanosine with phosphorothioate linkage
  modified_base 22: mod_base = OTHER; note = 2'-O-methyl-guanosine
tgtactcccacctgacactggg

SEQ ID NO: 639 - RNA, 22 nt, synthetic construct
  source 1..22: mol_type = other RNA
  modified_base 1: mod_base = OTHER; note = 2'-O-methyl-uridine with phosphorothioate linkage
  modified_base 2: mod_base = OTHER; note = 2'-fluoro-adenosine with phosphorothioate linkage
  modified_base 3: mod_base = OTHER; note = 2'-fluoro-guanosine
  modified_base 4: mod_base = OTHER; note = 2'-O-methyl-guanosine
  modified_base 5: mod_base = OTHER; note = 2'-fluoro-uridine
  modified_base 6: mod_base = OTHER; note = 2'-O-methyl-uridine
  modified_base 7: mod_base = OTHER; note = 2'-fluoro-guanosine
  modified_base 8: mod_base = OTHER; note = 2'-O-methyl-cytidine
  modified_base 9: mod_base = OTHER; note = 2'-O-methyl-adenosine
  modified_base 10: mod_base = OTHER; note = 2'-fluoro-guanosine
  modified_base 11: mod_base = OTHER; note = 2'-O-methyl-uridine
  modified_base 12: mod_base = OTHER; note = 2'-O-methyl-adenosine
  modified_base 13: mod_base = OTHER; note = 2'-O-methyl-cytidine
  modified_base 14: mod_base = OTHER; note = 2'-fluoro-uridine
  modified_base 15: mod_base = OTHER; note = 2'-O-methyl-cytidine
  modified_base 16: mod_base = OTHER; note = 2'-fluoro-cytidine
  modified_base 17: mod_base = OTHER; note = 2'-O-methyl-cytidine
  modified_base 18: mod_base = OTHER; note = 2'-O-methyl-adenosine
  modified_base 19: mod_base = OTHER; note = 2'-O-methyl-uridine
  modified_base 20: mod_base = OTHER; note = 2'-O-methyl-cytidine with phosphorothioate linkage
  modified_base 21: mod_base = OTHER; note = 2'-O-methyl-uridine with phosphorothioate linkage
  modified_base 22: mod_base = OTHER; note = 2'-O-methyl-guanosine
taggttgcagtactcccatctg

SEQ ID NO: 640 - RNA, 22 nt, synthetic construct
  source 1..22: mol_type = other RNA
  modified_base 1: mod_base = OTHER; note = 2'-O-methyl-uridine with phosphorothioate linkage
  modified_base 2: mod_base = OTHER; note = 2'-fluoro-cytidine with phosphorothioate linkage
  modified_base 3: mod_base = OTHER; note = 2'-fluoro-uridine
  modified_base 4: mod_base = OTHER; note = 2'-O-methyl-cytidine
  modified_base 5: mod_base = OTHER; note = 2'-fluoro-guanosine
  modified_base 6: mod_base = OTHER; note = 2'-O-methyl-adenosine
  modified_base 7: mod_base = OTHER; note = 2'-fluoro-uridine
  modified_base 8: mod_base = OTHER; note = 2'-O-methyl-adenosine
  modified_base 9: mod_base = OTHER; note = 2'-O-methyl-adenosine
  modified_base 10: mod_base = OTHER; note = 2'-fluoro-cytidine
  modified_base 11: mod_base = OTHER; note = 2'-O-methyl-uridine
  modified_base 12: mod_base = OTHER; note = 2'-O-methyl-cytidine
  modified_base 13: mod_base = OTHER; note = 2'-O-methyl-uridine
  modified_base 14: mod_base = OTHER; note = 2'-fluoro-guanosine
  modified_base 15: mod_base = OTHER; note = 2'-O-methyl-uridine
  modified_base 16: mod_base = OTHER; note = 2'-fluoro-cytidine
  modified_base 17: mod_base = OTHER; note = 2'-O-methyl-cytidine
  modified_base 18: mod_base = OTHER; note = 2'-O-methyl-adenosine
  modified_base 19: mod_base = OTHER; note = 2'-O-methyl-uridine
  modified_base 20: mod_base = OTHER; note = 2'-O-methyl-cytidine with phosphorothioate linkage
  modified_base 21: mod_base = OTHER; note = 2'-O-methyl-adenosine with phosphorothioate linkage
  modified_base 22: mod_base = OTHER; note = 2'-O-methyl-cytidine
tctcgataactctgtccatcac

SEQ ID NO: 641 - RNA, 22 nt, synthetic construct
  source 1..22: mol_type = other RNA
  modified_base 1: mod_base = OTHER; note = 2'-O-methyl-uridine with phosphorothioate linkage
  modified_base 2: mod_base = OTHER; note = 2'-fluoro-cytidine with phosphorothioate linkage
  modified_base 3: mod_base = OTHER; note = 2'-fluoro-adenosine
  modified_base 4: mod_base = OTHER; note = 2'-O-methyl-adenosine
  modified_base 5: mod_base = OTHER; note = 2'-fluoro-guanosine
  modified_base 6: mod_base = OTHER; note = 2'-O-methyl-adenosine
  modified_base 7: mod_base = OTHER; note = 2'-fluoro-cytidine
  modified_base 8: mod_base = OTHER; note = 2'-O-methyl-uridine
  modified_base 9: mod_base = OTHER; note = 2'-O-methyl-guanosine
  modified_base 10: mod_base = OTHER; note = 2'-fluoro-adenosine
  modified_base 11: mod_base = OTHER; note = 2'-O-methyl-cytidine
  modified_base 12: mod_base = OTHER; note = 2'-O-methyl-adenosine
  modified_base 13: mod_base = OTHER; note = 2'-O-methyl-uridine
  modified_base 14: mod_base = OTHER; note = 2'-fluoro-guanosine
  modified_base 15: mod_base = OTHER; note = 2'-O-methyl-uridine
  modified_base 16: mod_base = OTHER; note = 2'-fluoro-cytidine
  modified_base 17: mod_base = OTHER; note = 2'-O-methyl-cytidine
  modified_base 18: mod_base = OTHER; note = 2'-O-methyl-uridine
  modified_base 19: mod_base = OTHER; note = 2'-O-methyl-uridine
  modified_base 20: mod_base = OTHER; note = 2'-O-methyl-cytidine with phosphorothioate linkage
  modified_base 21: mod_base = OTHER; note = 2'-O-methyl-cytidine with phosphorothioate linkage
  modified_base 22: mod_base = OTHER; note = 2'-O-methyl-uridine
tcaagactgacatgtccttcct

SEQ ID NO: 642 - RNA, 22 nt, synthetic construct
  source 1..22: mol_type = other RNA
  modified_base 1: mod_base = OTHER; note = 2'-O-methyl-uridine with phosphorothioate linkage
  modified_base 2: mod_base = OTHER; note = 2'-fluoro-adenosine with phosphorothioate linkage
  modified_base 3: mod_base = OTHER; note = 2'-fluoro-cytidine
  modified_base 4: mod_base = OTHER; note = 2'-O-methyl-uridine
  modified_base 5: mod_base = OTHER; note = 2'-fluoro-uridine
  modified_base 6: mod_base = OTHER; note = 2'-O-methyl-guanosine
  modified_base 7: mod_base = OTHER; note = 2'-fluoro-adenosine
  modified_base 8: mod_base = OTHER; note = 2'-O-methyl-uridine
  modified_base 9: mod_base = OTHER; note = 2'-O-methyl-uridine
  modified_base 10: mod_base = OTHER; note = 2'-fluoro-cytidine
  modified_base 11: mod_base = OTHER; note = 2'-O-methyl-uridine
  modified_base 12: mod_base = OTHER; note = 2'-O-methyl-guanosine
  modified_base 13: mod_base = OTHER; note = 2'-O-methyl-uridine
  modified_base 14: mod_base = OTHER; note = 2'-fluoro-cytidine
  modified_base 15: mod_base = OTHER; note = 2'-O-methyl-adenosine
  modified_base 16: mod_base = OTHER; note = 2'-fluoro-cytidine
  modified_base 17: mod_base = OTHER; note = 2'-O-methyl-uridine
  modified_base 18: mod_base = OTHER; note = 2'-O-methyl-guanosine
  modified_base 19: mod_base = OTHER; note = 2'-O-methyl-guanosine
  modified_base 20: mod_base = OTHER; note = 2'-O-methyl-adenosine with phosphorothioate linkage
  modified_base 21: mod_base = OTHER; note = 2'-O-methyl-cytidine with phosphorothioate linkage
  modified_base 22: mod_base = OTHER; note = 2'-O-methyl-adenosine
tacttgattctgtcactggaca

SEQ ID NO: 643 - RNA, 22 nt, synthetic construct
  source 1..22: mol_type = other RNA
  modified_base 1: mod_base = OTHER; note = 2'-O-methyl-uridine with phosphorothioate linkage
  modified_base 2: mod_base = OTHER; note = 2'-fluoro-adenosine with phosphorothioate linkage
  modified_base 3: mod_base = OTHER; note = 2'-fluoro-adenosine
  modified_base 4: mod_base = OTHER; note = 2'-O-methyl-uridine
  modified_base 5: mod_base = OTHER; note = 2'-fluoro-adenosine
  modified_base 6: mod_base = OTHER; note = 2'-O-methyl-uridine
  modified_base 7: mod_base = OTHER; note = 2'-fluoro-uridine
  modified_base 8: mod_base = OTHER; note = 2'-O-methyl-cytidine
  modified_base 9: mod_base = OTHER; note = 2'-O-methyl-uridine
  modified_base 10: mod_base = OTHER; note = 2'-fluoro-guanosine
  modified_base 11: mod_base = OTHER; note = 2'-O-methyl-uridine
  modified_base 12: mod_base = OTHER; note = 2'-O-methyl-uridine
  modified_base 13: mod_base = OTHER; note = 2'-O-methyl-guanosine
  modified_base 14: mod_base = OTHER; note = 2'-fluoro-uridine
  modified_base 15: mod_base = OTHER; note = 2'-O-methyl-cytidine
  modified_base 16: mod_base = OTHER; note = 2'-fluoro-cytidine
  modified_base 17: mod_base = OTHER; note = 2'-O-methyl-uridine
  modified_base 18: mod_base = OTHER; note = 2'-O-methyl-cytidine
  modified_base 19: mod_base = OTHER; note = 2'-O-methyl-uridine
  modified_base 20: mod_base = OTHER; note = 2'-O-methyl-guanosine with phosphorothioate linkage
  modified_base 21: mod_base = OTHER; note = 2'-O-methyl-adenosine with phosphorothioate linkage
  modified_base 22: mod_base = OTHER; note = 2'-O-methyl-uridine
taatattctgttgtcctctgat

SEQ ID NO: 644 - RNA, 22 nt, synthetic construct
  source 1..22: mol_type = other RNA
  modified_base 1: mod_base = OTHER; note = 2'-O-methyl-uridine with phosphorothioate linkage
  modified_base 2: mod_base = OTHER; note = 2'-fluoro-guanosine with phosphorothioate linkage
  modified_base 3: mod_base = OTHER; note = 2'-fluoro-uridine
  modified_base 4: mod_base = OTHER; note = 2'-O-methyl-adenosine
  modified_base 5: mod_base = OTHER; note = 2'-fluoro-uridine
  modified_base 6: mod_base = OTHER; note = 2'-O-methyl-adenosine
  modified_base 7: mod_base = OTHER; note = 2'-fluoro-adenosine
  modified_base 8: mod_base = OTHER; note = 2'-O-methyl-cytidine
  modified_base 9: mod_base = OTHER; note = 2'-O-methyl-adenosine
  modified_base 10: mod_base = OTHER; note = 2'-fluoro-adenosine
  modified_base 11: mod_base = OTHER; note = 2'-O-methyl-uridine
  modified_base 12: mod_base = OTHER; note = 2'-O-methyl-adenosine
  modified_base 13: mod_base = OTHER; note = 2'-O-methyl-adenosine
  modified_base 14: mod_base = OTHER; note = 2'-fluoro-guanosine
  modified_base 15: mod_base = OTHER; note = 2'-O-methyl-guanosine
  modified_base 16: mod_base = OTHER; note = 2'-fluoro-guanosine
  modified_base 17: mod_base = OTHER; note = 2'-O-methyl-guanosine
  modified_base 18: mod_base = OTHER; note = 2'-O-methyl-cytidine
  modified_base 19: mod_base = OTHER; note = 2'-O-methyl-uridine
  modified_base 20: mod_base = OTHER; note = 2'-O-methyl-guanosine with phosphorothioate linkage
  modified_base 21: mod_base = OTHER; note = 2'-O-methyl-cytidine with phosphorothioate linkage
  modified_base 22: mod_base = OTHER; note = 2'-O-methyl-cytidine
tgtataacaataaggggctgcc

SEQ ID NO: 645 - RNA, 22 nt, synthetic construct
  source 1..22: mol_type = other RNA
  modified_base 1: mod_base = OTHER; note = 2'-O-methyl-uridine with phosphorothioate linkage
  modified_base 2: mod_base = OTHER; note = 2'-fluoro-uridine with phosphorothioate linkage
  modified_base 3: mod_base = OTHER; note = 2'-fluoro-cytidine
  modified_base 4: mod_base = OTHER; note = 2'-O-methyl-adenosine
  modified_base 5: mod_base = OTHER; note = 2'-fluoro-guanosine
  modified_base 6: mod_base = OTHER; note = 2'-O-methyl-guanosine
  modified_base 7: mod_base = OTHER; note = 2'-fluoro-cytidine
  modified_base 8: mod_base = OTHER; note = 2'-O-methyl-cytidine
  modified_base 9: mod_base = OTHER; note = 2'-O-methyl-adenosine
  modified_base 10: mod_base = OTHER; note = 2'-fluoro-cytidine
  modified_base 11: mod_base = OTHER; note = 2'-O-methyl-cytidine
  modified_base 12: mod_base = OTHER; note = 2'-O-methyl-adenosine
  modified_base 13: mod_base = OTHER; note = 2'-O-methyl-uridine
  modified_base 14: mod_base = OTHER; note = 2'-fluoro-uridine
  modified_base 15: mod_base = OTHER; note = 2'-O-methyl-uridine
  modified_base 16: mod_base = OTHER; note = 2'-fluoro-guanosine
  modified_base 17: mod_base = OTHER; note = 2'-O-methyl-guanosine
  modified_base 18: mod_base = OTHER; note = 2'-O-methyl-guanosine
  modified_base 19: mod_base = OTHER; note = 2'-O-methyl-uridine
  modified_base 20: mod_base = OTHER; note = 2'-O-methyl-adenosine with phosphorothioate linkage
  modified_base 21: mod_base = OTHER; note = 2'-O-methyl-guanosine with phosphorothioate linkage
  modified_base 22: mod_base = OTHER; note = 2'-O-methyl-uridine
ttcaggccaccatttgggtagt

SEQ ID NO: 646 - RNA, 22 nt, synthetic construct
  source 1..22: mol_type = other RNA
  modified_base 1: mod_base = OTHER; note = 2'-O-methyl-uridine with phosphorothioate linkage
  modified_base 2: mod_base = OTHER; note = 2'-fluoro-adenosine with phosphorothioate linkage
  modified_base 3: mod_base = OTHER; note = 2'-fluoro-uridine
  modified_base 4: mod_base = OTHER; note = 2'-O-methyl-adenosine
  modified_base 5: mod_base = OTHER; note = 2'-fluoro-adenosine
  modified_base 6: mod_base = OTHER; note = 2'-O-methyl-uridine
  modified_base 7: mod_base = OTHER; note = 2'-fluoro-adenosine
  modified_base 8: mod_base = OTHER; note = 2'-O-methyl-uridine
  modified_base 9: mod_base = OTHER; note = 2'-O-methyl-uridine
  modified_base 10: mod_base = OTHER; note = 2'-fluoro-cytidine
  modified_base 11: mod_base = OTHER; note = 2'-O-methyl-uridine
  modified_base 12: mod_base = OTHER; note = 2'-O-methyl-guanosine
  modified_base 13: mod_base = OTHER; note = 2'-O-methyl-uridine
  modified_base 14: mod_base = OTHER; note = 2'-fluoro-uridine
  modified_base 15: mod_base = OTHER; note = 2'-O-methyl-guanosine
  modified_base 16: mod_base = OTHER; note = 2'-fluoro-uridine
  modified_base 17: mod_base = OTHER; note = 2'-O-methyl-cytidine
  modified_base 18: mod_base = OTHER; note = 2'-O-methyl-cytidine
  modified_base 19: mod_base = OTHER; note = 2'-O-methyl-uridine
  modified_base 20: mod_base = OTHER; note = 2'-O-methyl-cytidine with phosphorothioate linkage
  modified_base 21: mod_base = OTHER; note = 2'-O-methyl-uridine with phosphorothioate linkage
  modified_base 22: mod_base = OTHER; note = 2'-O-methyl-guanosine
tataatattctgttgtcctctg

SEQ ID NO: 647 - RNA, 22 nt, synthetic construct
  source 1..22: mol_type = other RNA
  modified_base 1: mod_base = OTHER; note = 2'-O-methyl-uridine with phosphorothioate linkage
  modified_base 2: mod_base = OTHER; note = 2'-fluoro-adenosine with phosphorothioate linkage
  modified_base 3: mod_base = OTHER; note = 2'-fluoro-uridine
  modified_base 4: mod_base = OTHER; note = 2'-O-methyl-guanosine
  modified_base 5: mod_base = OTHER; note = 2'-fluoro-adenosine
  modified_base 6: mod_base = OTHER; note = 2'-O-methyl-guanosine
  modified_base 7: mod_base = OTHER; note = 2'-fluoro-cytidine
  modified_base 8: mod_base = OTHER; note = 2'-O-methyl-cytidine
  modified_base 9: mod_base = OTHER; note = 2'-O-methyl-uridine
  modified_base 10: mod_base = OTHER; note = 2'-fluoro-cytidine
  modified_base 11: mod_base = OTHER; note = 2'-O-methyl-guanosine
  modified_base 12: mod_base = OTHER; note = 2'-O-methyl-adenosine
  modified_base 13: mod_base = OTHER; note = 2'-O-methyl-uridine
  modified_base 14: mod_base = OTHER; note = 2'-fluoro-adenosine
  modified_base 15: mod_base = OTHER; note = 2'-O-methyl-adenosine
  modified_base 16: mod_base = OTHER; note = 2'-fluoro-cytidine
  modified_base 17: mod_base = OTHER; note = 2'-O-methyl-uridine
  modified_base 18: mod_base = OTHER; note = 2'-O-methyl-cytidine
  modified_base 19: mod_base = OTHER; note = 2'-O-methyl-uridine
  modified_base 20: mod_base = OTHER; note = 2'-O-methyl-guanosine with phosphorothioate linkage
  modified_base 21: mod_base = OTHER; note = 2'-O-methyl-uridine with phosphorothioate linkage
  modified_base 22: mod_base = OTHER; note = 2'-O-methyl-cytidine
tatgagcctcgataactctgtc

SEQ ID NO: 648 - RNA, 22 nt, synthetic construct
  source 1..22: mol_type = other RNA
  modified_base 1: mod_base = OTHER; note = 2'-O-methyl-uridine with phosphorothioate linkage
  modified_base 2: mod_base = OTHER; note = 2'-fluoro-cytidine with phosphorothioate linkage
  modified_base 3: mod_base = OTHER; note = 2'-fluoro-uridine
  modified_base 4: mod_base = OTHER; note = 2'-O-methyl-cytidine
  modified_base 5: mod_base = OTHER; note = 2'-fluoro-uridine
  modified_base 6: mod_base = OTHER; note = 2'-O-methyl-adenosine
  modified_base 7: mod_base = OTHER; note = 2'-fluoro-guanosine
  modified_base 8: mod_base = OTHER; note = 2'-O-methyl-guanosine
  modified_base 9: mod_base = OTHER; note = 2'-O-methyl-cytidine
  modified_base 10: mod_base = OTHER; note = 2'-fluoro-uridine
  modified_base 11: mod_base = OTHER; note = 2'-O-methyl-uridine
  modified_base 12: mod_base = OTHER; note = 2'-O-methyl-guanosine
  modified_base 13: mod_base = OTHER; note = 2'-O-methyl-guanosine
  modified_base 14: mod_base = OTHER; note = 2'-fluoro-adenosine
  modified_base 15: mod_base = OTHER; note = 2'-O-methyl-adenosine
  modified_base 16: mod_base = OTHER; note = 2'-fluoro-cytidine
  modified_base 17: mod_base = OTHER; note = 2'-O-methyl-cytidine
  modified_base 18: mod_base = OTHER; note = 2'-O-methyl-guanosine
  modified_base 19: mod_base = OTHER; note = 2'-O-methyl-guanosine
  modified_base 20: mod_base = OTHER; note = 2'-O-methyl-guanosine with phosphorothioate linkage
  modified_base 21: mod_base = OTHER; note = 2'-O-methyl-guanosine with phosphorothioate linkage
  modified_base 22: mod_base = OTHER; note = 2'-O-methyl-uridine
tctctaggcttggaaccggggt

SEQ ID NO: 649 - RNA, 22 nt, synthetic construct
  source 1..22: mol_type = other RNA
  modified_base 1: mod_base = OTHER; note = 2'-O-methyl-uridine with phosphorothioate linkage
  modified_base 2: mod_base = OTHER; note = 2'-fluoro-guanosine with phosphorothioate linkage
  modified_base 3: mod_base = OTHER; note = 2'-fluoro-adenosine
  modified_base 4: mod_base = OTHER; note = 2'-O-methyl-uridine
  modified_base 5: mod_base = OTHER; note = 2'-fluoro-adenosine
  modified_base 6: mod_base = OTHER; note = 2'-O-methyl-adenosine
  modified_base 7: mod_base = OTHER; note = 2'-fluoro-uridine
  modified_base 8: mod_base = OTHER; note = 2'-O-methyl-adenosine
  modified_base 9: mod_base = OTHER; note = 2'-O-methyl-uridine
  modified_base 10: mod_base = OTHER; note = 2'-fluoro-uridine
  modified_base 11: mod_base = OTHER; note = 2'-O-methyl-cytidine
  modified_base 12: mod_base = OTHER; note = 2'-O-methyl-uridine
  modified_base 13: mod_base = OTHER; note = 2'-O-methyl-guanosine
  modified_base 14: mod_base = OTHER; note = 2'-fluoro-uridine
  modified_base 15: mod_base = OTHER; note = 2'-O-methyl-uridine
  modified_base 16: mod_base = OTHER; note = 2'-fluoro-guanosine
  modified_base 17: mod_base = OTHER; note = 2'-O-methyl-uridine
  modified_base 18: mod_base = OTHER; note = 2'-O-methyl-cytidine
  modified_base 19: mod_base = OTHER; note = 2'-O-methyl-cytidine
  modified_base 20: mod_base = OTHER; note = 2'-O-methyl-uridine with phosphorothioate linkage
  modified_base 21: mod_base = OTHER; note = 2'-O-methyl-cytidine with phosphorothioate linkage
  modified_base 22: mod_base = OTHER; note = 2'-O-methyl-uridine
tgataatattctgttgtcctct

SEQ ID NO: 650 - RNA, 22 nt, synthetic construct
  source 1..22: mol_type = other RNA
  modified_base 1: mod_base = OTHER; note = 2'-O-methyl-uridine with phosphorothioate linkage
  modified_base 2: mod_base = OTHER; note = 2'-fluoro-uridine with phosphorothioate linkage
  modified_base 3: mod_base = OTHER; note = 2'-fluoro-guanosine
  modified_base 4: mod_base = OTHER; note = 2'-O-methyl-cytidine
  modified_base 5: mod_base = OTHER; note = 2'-fluoro-adenosine
  modified_base 6: mod_base = OTHER; note = 2'-O-methyl-guanosine
  modified_base 7: mod_base = OTHER; note = 2'-fluoro-uridine
  modified_base 8: mod_base = OTHER; note = 2'-O-methyl-adenosine
  modified_base 9: mod_base = OTHER; note = 2'-O-methyl-cytidine
  modified_base 10: mod_base = OTHER; note = 2'-fluoro-uridine
  modified_base 11: mod_base = OTHER; note = 2'-O-methyl-cytidine
  modified_base 12: mod_base = OTHER; note = 2'-O-methyl-cytidine
  modified_base 13: mod_base = OTHER; note = 2'-O-methyl-cytidine
  modified_base 14: mod_base = OTHER; note = 2'-fluoro-adenosine
  modified_base 15: mod_base = OTHER; note = 2'-O-methyl-cytidine
  modified_base 16: mod_base = OTHER; note = 2'-fluoro-cytidine
  modified_base 17: mod_base = OTHER; note = 2'-O-methyl-uridine
  modified_base 18: mod_base = OTHER; note = 2'-O-methyl-guanosine
  modified_base 19: mod_base = OTHER; note = 2'-O-methyl-adenosine
  modified_base 20: mod_base = OTHER; note = 2'-O-methyl-cytidine with phosphorothioate linkage
  modified_base 21: mod_base = OTHER; note = 2'-O-methyl-adenosine with phosphorothioate linkage
  modified_base 22: mod_base = OTHER; note = 2'-O-methyl-cytidine
ttgcagtactcccacctgacac

SEQ ID NO: 651 - RNA, 22 nt, synthetic construct
  source 1..22: mol_type = other RNA
  modified_base 1: mod_base = OTHER; note = 2'-O-methyl-uridine with phosphorothioate linkage
  modified_base 2: mod_base = OTHER; note = 2'-fluoro-adenosine with phosphorothioate linkage
  modified_base 3: mod_base = OTHER; note = 2'-fluoro-cytidine
  modified_base 4: mod_base = OTHER; note = 2'-O-methyl-adenosine
  modified_base 5: mod_base = OTHER; note = 2'-fluoro-uridine
  modified_base 6: mod_base = OTHER; note = 2'-O-methyl-guanosine
  modified_base 7: mod_base = OTHER; note = 2'-fluoro-uridine
  modified_base 8: mod_base = OTHER; note = 2'-O-methyl-cytidine
  modified_base 9: mod_base = OTHER; note = 2'-O-methyl-cytidine
  modified_base 10: mod_base = OTHER; note = 2'-fluoro-uridine
  modified_base 11: mod_base = OTHER; note = 2'-O-methyl-uridine
  modified_base 12: mod_base = OTHER; note = 2'-O-methyl-cytidine
  modified_base 13: mod_base = OTHER; note = 2'-O-methyl-cytidine
  modified_base 14: mod_base = OTHER; note = 2'-fluoro-uridine
  modified_base 15: mod_base = OTHER; note = 2'-O-methyl-guanosine
  modified_base 16: mod_base = OTHER; note = 2'-fluoro-uridine
  modified_base 17: mod_base = OTHER; note = 2'-O-methyl-guanosine
  modified_base 18: mod_base = OTHER; note = 2'-O-methyl-adenosine
  modified_base 19: mod_base = OTHER; note = 2'-O-methyl-cytidine
  modified_base 20: mod_base = OTHER; note = 2'-O-methyl-adenosine with phosphorothioate linkage
  modified_base 21: mod_base = OTHER; note = 2'-O-methyl-guanosine with phosphorothioate linkage
  modified_base 22: mod_base = OTHER; note = 2'-O-methyl-uridine
tacatgtccttcctgtgacagt

SEQ ID NO: 652 - RNA, 22 nt, synthetic construct
  source 1..22: mol_type = other RNA
  modified_base 1: mod_base = OTHER; note = 2'-O-methyl-uridine with phosphorothioate linkage
  modified_base 2: mod_base = OTHER; note = 2'-fluoro-cytidine with phosphorothioate linkage
  modified_base 3: mod_base = OTHER; note = 2'-fluoro-adenosine
  modified_base 4: mod_base = OTHER; note = 2'-O-methyl-adenosine
  modified_base 5: mod_base = OTHER; note = 2'-fluoro-uridine
  modified_base 6: mod_base = OTHER; note = 2'-O-methyl-adenosine
  modified_base 7: mod_base = OTHER; note = 2'-fluoro-adenosine
  modified_base 8: mod_base = OTHER; note = 2'-O-methyl-guanosine
  modified_base 9: mod_base = OTHER; note = 2'-O-methyl-guanosine
  modified_base 10: mod_base = OTHER; note = 2'-fluoro-guanosine
  modified_base 11: mod_base = OTHER; note = 2'-O-methyl-guanosine
  modified_base 12: mod_base = OTHER; note = 2'-O-methyl-cytidine
  modified_base 13: mod_base = OTHER; note = 2'-O-methyl-uridine
  modified_base 14: mod_base = OTHER; note = 2'-fluoro-guanosine
  modified_base 15: mod_base = OTHER; note = 2'-O-methyl-cytidine
  modified_base 16: mod_base = OTHER; note = 2'-fluoro-cytidine
  modified_base 17: mod_base = OTHER; note = 2'-O-methyl-adenosine
  modified_base 18: mod_base = OTHER; note = 2'-O-methyl-cytidine
  modified_base 19: mod_base = OTHER; note = 2'-O-methyl-adenosine
  modified_base 20: mod_base = OTHER; note = 2'-O-methyl-guanosine with phosphorothioate linkage
  modified_base 21: mod_base = OTHER; note = 2'-O-methyl-guanosine with phosphorothioate linkage
  modified_base 22: mod_base = OTHER; note = 2'-O-methyl-adenosine
tcaataaggggctgccacagga

SEQ ID NO: 653 - RNA, 22 nt, synthetic construct
  source 1..22: mol_type = other RNA
  modified_base 1: mod_base = OTHER; note = 2'-O-methyl-uridine with phosphorothioate linkage
  modified_base 2: mod_base = OTHER; note = 2'-fluoro-uridine with phosphorothioate linkage
  modified_base 3: mod_base = OTHER; note = 2'-fluoro-guanosine
  modified_base 4: mod_base = OTHER; note = 2'-O-methyl-uridine
  modified_base 5: mod_base = OTHER; note = 2'-fluoro-guanosine
  modified_base 6: mod_base = OTHER; note = 2'-O-methyl-guanosine
  modified_base 7: mod_base = OTHER; note = 2'-fluoro-uridine
  modified_base 8: mod_base = OTHER; note = 2'-O-methyl-guanosine
  modified_base 9: mod_base = OTHER; note = 2'-O-methyl-uridine
  modified_base 10: mod_base = OTHER; note = 2'-fluoro-cytidine
  modified_base 11: mod_base = OTHER; note = 2'-O-methyl-adenosine
  modified_base 12: mod_base = OTHER; note = 2'-O-methyl-uridine
  modified_base 13: mod_base = OTHER; note = 2'-O-methyl-adenosine
  modified_base 14: mod_base = OTHER; note = 2'-fluoro-guanosine
  modified_base 15: mod_base = OTHER; note = 2'-O-methyl-adenosine
  modified_base 16: mod_base = OTHER; note = 2'-fluoro-guanosine
  modified_base 17: mod_base = OTHER; note = 2'-O-methyl-guanosine
  modified_base 18: mod_base = OTHER; note = 2'-O-methyl-adenosine
  modified_base 19: mod_base = OTHER; note = 2'-O-methyl-cytidine
  modified_base 20: mod_base = OTHER; note = 2'-O-methyl-cytidine with phosphorothioate linkage
  modified_base 21: mod_base = OTHER; note = 2'-O-methyl-adenosine with phosphorothioate linkage
  modified_base 22: mod_base = OTHER; note = 2'-O-methyl-adenosine
ttgtggtgtcatagaggaccaa

SEQ ID NO: 654 - RNA, 22 nt, synthetic construct
  source 1..22: mol_type = other RNA
  modified_base 1: mod_base = OTHER; note = 2'-O-methyl-uridine with phosphorothioate linkage
  modified_base 2: mod_base = OTHER; note = 2'-fluoro-cytidine with phosphorothioate linkage
  modified_base 3: mod_base = OTHER; note = 2'-fluoro-cytidine
  modified_base 4: mod_base = OTHER; note = 2'-O-methyl-guanosine
  modified_base 5: mod_base = OTHER; note = 2'-fluoro-uridine
  modified_base 6: mod_base = OTHER; note = 2'-O-methyl-uridine
  modified_base 7: mod_base = OTHER; note = 2'-fluoro-guanosine
  modified_base 8: mod_base = OTHER; note = 2'-O-methyl-guanosine
  modified_base 9: mod_base = OTHER; note = 2'-O-methyl-uridine
  modified_base 10: mod_base = OTHER; note = 2'-fluoro-guanosine
  modified_base 11: mod_base = OTHER; note = 2'-O-methyl-cytidine
  modified_base 12: mod_base = OTHER; note = 2'-O-methyl-uridine
  modified_base 13: mod_base = OTHER; note = 2'-O-methyl-uridine
  modified_base 14: mod_base = OTHER; note = 2'-fluoro-cytidine
  modified_base 15: mod_base = OTHER; note = 2'-O-methyl-uridine
  modified_base 16: mod_base = OTHER; note = 2'-fluoro-uridine
  modified_base 17: mod_base = OTHER; note = 2'-O-methyl-cytidine
  modified_base 18: mod_base = OTHER; note = 2'-O-methyl-adenosine
  modified_base 19: mod_base = OTHER; note = 2'-O-methyl-guanosine
  modified_base 20: mod_base = OTHER; note = 2'-O-methyl-adenosine with phosphorothioate linkage
  modified_base 21: mod_base = OTHER; note = 2'-O-methyl-adenosine with phosphorothioate linkage
  modified_base 22: mod_base = OTHER; note = 2'-O-methyl-guanosine
tccgttggtgcttcttcagaag

SEQ ID NO: 655 - RNA, 22 nt, synthetic construct
  source 1..22: mol_type = other RNA
  modified_base 1: mod_base = OTHER; note = 2'-O-methyl-uridine with phosphorothioate linkage
  modified_base 2: mod_base = OTHER; note = 2'-fluoro-adenosine with phosphorothioate linkage
  modified_base 3: mod_base = OTHER; note = 2'-fluoro-cytidine
  modified_base 4: mod_base = OTHER; note = 2'-O-methyl-cytidine
  modified_base 5: mod_base = OTHER; note = 2'-fluoro-adenosine
  modified_base 6: mod_base = OTHER; note = 2'-O-methyl-adenosine
  modified_base 7: mod_base = OTHER; note = 2'-fluoro-guanosine
  modified_base 8: mod_base = OTHER; note = 2'-O-methyl-adenosine
  modified_base 9: mod_base = OTHER; note = 2'-O-methyl-cytidine
  modified_base 10: mod_base = OTHER; note = 2'-fluoro-uridine
  modified_base 11: mod_base = OTHER; note = 2'-O-methyl-guanosine
  modified_base 12: mod_base = OTHER; note = 2'-O-methyl-adenosine
  modified_base 13: mod_base = OTHER; note = 2'-O-methyl-cytidine
  modified_base 14: mod_base = OTHER; note = 2'-fluoro-adenosine
  modified_base 15: mod_base = OTHER; note = 2'-O-methyl-uridine
  modified_base 16: mod_base = OTHER; note = 2'-fluoro-guanosine
  modified_base 17: mod_base = OTHER; note = 2'-O-methyl-uridine
  modified_base 18: mod_base = OTHER; note = 2'-O-methyl-cytidine
  modified_base 19: mod_base = OTHER; note = 2'-O-methyl-cytidine
  modified_base 20: mod_base = OTHER; note = 2'-O-methyl-uridine with phosphorothioate linkage
  modified_base 21: mod_base = OTHER; note = 2'-O-methyl-uridine with phosphorothioate linkage
  modified_base 22: mod_base = OTHER; note = 2'-O-methyl-cytidine
taccaagactgacatgtccttc

SEQ ID NO: 656 - RNA, 22 nt, synthetic construct
  source 1..22: mol_type = other RNA
  modified_base 1: mod_base = OTHER; note = 2'-O-methyl-uridine with phosphorothioate linkage
  modified_base 2: mod_base = OTHER; note = 2'-fluoro-adenosine with phosphorothioate linkage
  modified_base 3: mod_base = OTHER; note = 2'-fluoro-guanosine
  modified_base 4: mod_base = OTHER; note = 2'-O-methyl-adenosine
  modified_base 5: mod_base = OTHER; note = 2'-fluoro-adenosine
  modified_base 6: mod_base = OTHER; note = 2'-O-methyl-uridine
  modified_base 7: mod_base = OTHER; note = 2'-fluoro-guanosine
  modified_base 8: mod_base = OTHER; note = 2'-O-methyl-adenosine
  modified_base 9: mod_base = OTHER; note = 2'-O-methyl-guanosine
  modified_base 10: mod_base = OTHER; note = 2'-fluoro-cytidine
  modified_base 11: mod_base = OTHER; note = 2'-O-methyl-cytidine
  modified_base 12: mod_base = OTHER; note = 2'-O-methyl-uridine
  modified_base 13: mod_base = OTHER; note = 2'-O-methyl-cytidine
  modified_base 14: mod_base = OTHER; note = 2'-fluoro-guanosine
  modified_base 15: mod_base = OTHER; note = 2'-O-methyl-adenosine
  modified_base 16: mod_base = OTHER; note = 2'-fluoro-uridine
  modified_base 17: mod_base = OTHER; note = 2'-O-methyl-adenosine
  modified_base 18: mod_base = OTHER; note = 2'-O-methyl-adenosine
  modified_base 19: mod_base = OTHER; note = 2'-O-methyl-cytidine
  modified_base 20: mod_base = OTHER; note = 2'-O-methyl-uridine with phosphorothioate linkage
  modified_base 21: mod_base = OTHER; note = 2'-O-methyl-cytidine with phosphorothioate linkage
  modified_base 22: mod_base = OTHER; note = 2'-O-methyl-uridine
tagaatgagcctcgataactct

SEQ ID NO: 657 - RNA, 22 nt, synthetic construct
  source 1..22: mol_type = other RNA
  modified_base 1: mod_base = OTHER; note = 2'-O-methyl-uridine with phosphorothioate linkage
  modified_base 2: mod_base = OTHER; note = 2'-fluoro-cytidine with phosphorothioate linkage
  modified_base 3: mod_base = OTHER; note = 2'-fluoro-uridine
  modified_base 4: mod_base = OTHER; note = 2'-O-methyl-uridine
  modified_base 5: mod_base = OTHER; note = 2'-fluoro-guanosine
  modified_base 6: mod_base = OTHER; note = 2'-O-methyl-guanosine
  modified_base 7: mod_base = OTHER; note = 2'-fluoro-cytidine
  modified_base 8: mod_base = OTHER; note = 2'-O-methyl-adenosine
  modified_base 9: mod_base = OTHER; note = 2'-O-methyl-guanosine
  modified_base 10: mod_base = OTHER; note = 2'-fluoro-guanosine
  modified_base 11: mod_base = OTHER; note = 2'-O-methyl-uridine
  modified_base 12: mod_base = OTHER; note = 2'-O-methyl-uridine
  modified_base 13: mod_base = OTHER; note = 2'-O-methyl-cytidine
  modified_base 14: mod_base = OTHER; note = 2'-fluoro-uridine
  modified_base 15: mod_base = OTHER; note = 2'-O-methyl-uridine
  modified_base 16: mod_base = OTHER; note = 2'-fluoro-cytidine
  modified_base 17: mod_base = OTHER; note = 2'-O-methyl-cytidine
  modified_base 18: mod_base = OTHER; note = 2'-O-methyl-uridine
  modified_base 19: mod_base = OTHER; note = 2'-O-methyl-guanosine
  modified_base 20: mod_base = OTHER; note = 2'-O-methyl-uridine with phosphorothioate linkage
  modified_base 21: mod_base = OTHER; note = 2'-O-methyl-guanosine with phosphorothioate linkage
  modified_base 22: mod_base = OTHER; note = 2'-O-methyl-adenosine
tcttggcaggttcttcctgtga

SEQ ID NO: 658 - RNA, 22 nt, synthetic construct
  source 1..22: mol_type = other RNA
  modified_base 1: mod_base = OTHER; note = 2'-O-methyl-uridine with phosphorothioate linkage
  modified_base 2: mod_base = OTHER; note = 2'-fluoro-uridine with phosphorothioate linkage
  modified_base 3: mod_base = OTHER; note = 2'-fluoro-guanosine
  modified_base 4: mod_base = OTHER; note = 2'-O-methyl-cytidine
  modified_base 5: mod_base = OTHER; note = 2'-fluoro-uridine
  modified_base 6: mod_base = OTHER; note = 2'-O-methyl-cytidine
  modified_base 7: mod_base = OTHER; note = 2'-fluoro-cytidine
  modified_base 8: mod_base = OTHER; note = 2'-O-methyl-guanosine
  modified_base 9: mod_base = OTHER; note = 2'-O-methyl-uridine
  modified_base 10: mod_base = OTHER; note = 2'-fluoro-uridine
  modified_base 11: mod_base = OTHER; note = 2'-O-methyl-guanosine
  modified_base 12: mod_base = OTHER; note = 2'-O-methyl-guanosine
  modified_base 13: mod_base = OTHER; note = 2'-O-methyl-uridine
  modified_base 14: mod_base = OTHER; note = 2'-fluoro-guanosine
  modified_base 15: mod_base = OTHER; note = 2'-O-methyl-cytidine
  modified_base 16: mod_base = OTHER; note = 2'-fluoro-uridine
  modified_base 17: mod_base = OTHER; note = 2'-O-methyl-uridine
  modified_base 18: mod_base = OTHER; note = 2'-O-methyl-cytidine
  modified_base 19: mod_base = OTHER; note = 2'-O-methyl-uridine
  modified_base 20: mod_base = OTHER; note = 2'-O-methyl-uridine with phosphorothioate linkage
  modified_base 21: mod_base = OTHER; note = 2'-O-methyl-cytidine with phosphorothioate linkage
  modified_base 22: mod_base = OTHER; note = 2'-O-methyl-adenosine
ttgctccgttggtgcttcttca

SEQ ID NO: 659 - RNA, 22 nt, synthetic construct
  source 1..22: mol_type = other RNA
  modified_base 1: mod_base = OTHER; note = 2'-O-methyl-uridine with phosphorothioate linkage
  modified_base 2: mod_base = OTHER; note = 2'-fluoro-adenosine with phosphorothioate linkage
  modified_base 3: mod_base = OTHER; note = 2'-fluoro-uridine
  modified_base 4: mod_base = OTHER; note = 2'-O-methyl-uridine
  modified_base 5: mod_base = OTHER; note = 2'-fluoro-cytidine
  modified_base 6: mod_base = OTHER; note = 2'-O-methyl-uridine
  modified_base 7: mod_base = OTHER; note = 2'-fluoro-guanosine
  modified_base 8: mod_base = OTHER; note = 2'-O-methyl-uridine
  modified_base 9: mod_base = OTHER; note = 2'-O-methyl-uridine
  modified_base 10: mod_base = OTHER; note = 2'-fluoro-guanosine
  modified_base 11: mod_base = OTHER; note = 2'-O-methyl-uridine
  modified_base 12: mod_base = OTHER; note = 2'-O-methyl-cytidine
  modified_base 13: mod_base = OTHER; note = 2'-O-methyl-cytidine
  modified_base 14: mod_base = OTHER; note = 2'-fluoro-uridine
  modified_base 15: mod_base = OTHER; note = 2'-O-methyl-cytidine
  modified_base 16: mod_base = OTHER; note = 2'-fluoro-uridine
  modified_base 17: mod_base = OTHER; note = 2'-O-methyl-guanosine
  modified_base 18: mod_base = OTHER; note = 2'-O-methyl-adenosine
  modified_base 19: mod_base = OTHER; note = 2'-O-methyl-uridine
  modified_base 20: mod_base = OTHER; note = 2'-O-methyl-guanosine with phosphorothioate linkage
  modified_base 21: mod_base = OTHER; note = 2'-O-methyl-cytidine with phosphorothioate linkage
  modified_base 22: mod_base = OTHER; note = 2'-O-methyl-cytidine
tattctgttgtcctctgatgcc

SEQ ID NO: 660 - RNA, 22 nt, synthetic construct
  source 1..22: mol_type = other RNA
  modified_base 1: mod_base = OTHER; note = 2'-O-methyl-uridine with phosphorothioate linkage
  modified_base 2: mod_base = OTHER; note = 2'-fluoro-adenosine with phosphorothioate linkage
  modified_base 3: mod_base = OTHER; note = 2'-fluoro-adenosine
  modified_base 4: mod_base = OTHER; note = 2'-O-methyl-guanosine
  modified_base 5: mod_base = OTHER; note = 2'-fluoro-cytidine
  modified_base 6: mod_base = OTHER; note = 2'-O-methyl-uridine
  modified_base 7: mod_base = OTHER; note = 2'-fluoro-uridine
  modified_base 8: mod_base = OTHER; note = 2'-O-methyl-guanosine
  modified_base 9: mod_base = OTHER; note = 2'-O-methyl-guanosine
  modified_base 10: mod_base = OTHER; note = 2'-fluoro-cytidine
  modified_base 11: mod_base = OTHER; note = 2'-O-methyl-adenosine
  modified_base 12: mod_base = OTHER; note = 2'-O-methyl-adenosine
  modified_base 13: mod_base = OTHER; note = 2'-O-methyl-guanosine
  modified_base 14: mod_base = OTHER; note = 2'-fluoro-uridine
  modified_base 15: mod_base = OTHER; note = 2'-O-methyl-uridine
  modified_base 16: mod_base = OTHER; note = 2'-fluoro-cytidine
  modified_base 17: mod_base = OTHER; note = 2'-O-methyl-uridine
  modified_base 18: mod_base = OTHER; note = 2'-O-methyl-uridine
  modified_base 19: mod_base = OTHER; note = 2'-O-methyl-cytidine
  modified_base 20: mod_base = OTHER; note = 2'-O-methyl-cytidine with phosphorothioate linkage
  modified_base 21: mod_base = OTHER; note = 2'-O-methyl-uridine with phosphorothioate linkage
  modified_base 22: mod_base = OTHER; note = 2'-O-methyl-guanosine
taagcttggcaagttcttcctg

SEQ ID NO: 661 - RNA, 22 nt, synthetic construct
  source 1..22: mol_type = other RNA
  modified_base 1: mod_base = OTHER; note = 2'-O-methyl-uridine with phosphorothioate linkage
  modified_base 2: mod_base = OTHER; note = 2'-fluoro-cytidine with phosphorothioate linkage
  modified_base 3: mod_base = OTHER; note = 2'-fluoro-uridine
  modified_base 4: mod_base = OTHER; note = 2'-O-methyl-guanosine
  modified_base 5: mod_base = OTHER; note = 2'-fluoro-uridine
  modified_base 6: mod_base = OTHER; note = 2'-O-methyl-cytidine
  modified_base 7: mod_base = OTHER; note = 2'-fluoro-cytidine
  modified_base 8: mod_base = OTHER; note = 2'-O-methyl-adenosine
  modified_base 9: mod_base = OTHER; note = 2'-O-methyl-uridine
  modified_base 10: mod_base = OTHER; note = 2'-fluoro-cytidine
  modified_base 11: mod_base = OTHER; note = 2'-O-methyl-adenosine
  modified_base 12: mod_base = OTHER; note = 2'-O-methyl-cytidine
  modified_base 13: mod_base = OTHER; note = 2'-O-methyl-cytidine
  modified_base 14: mod_base = OTHER; note = 2'-fluoro-adenosine
  modified_base 15: mod_base = OTHER; note = 2'-O-methyl-uridine
  modified_base 16: mod_base = OTHER; note = 2'-fluoro-guanosine
  modified_base 17: mod_base = OTHER; note = 2'-O-methyl-guanosine
  modified_base 18: mod_base = OTHER; note = 2'-O-methyl-uridine
  modified_base 19: mod_base = OTHER; note = 2'-O-methyl-adenosine
  modified_base 20: mod_base = OTHER; note = 2'-O-methyl-guanosine with phosphorothioate linkage
  modified_base 21: mod_base = OTHER; note = 2'-O-methyl-cytidine with phosphorothioate linkage
  modified_base 22: mod_base = OTHER; note = 2'-O-methyl-adenosine
tctgtccatcaccatggtagca

SEQ ID NO: 662 - RNA, 22 nt, synthetic construct
  source 1..22: mol_type = other RNA
  modified_base 1: mod_base = OTHER; note = 2'-O-methyl-uridine with phosphorothioate linkage
  modified_base 2: mod_base = OTHER; note = 2'-fluoro-cytidine with phosphorothioate linkage
  modified_base 3: mod_base = OTHER; note = 2'-fluoro-cytidine
  modified_base 4: mod_base = OTHER; note = 2'-O-methyl-adenosine
  modified_base 5: mod_base = OTHER; note = 2'-fluoro-adenosine
  modified_base 6: mod_base = OTHER; note = 2'-O-methyl-guanosine
  modified_base 7: mod_base = OTHER; note = 2'-fluoro-adenosine
  modified_base 8: mod_base = OTHER; note = 2'-O-methyl-cytidine
  modified_base 9: mod_base = OTHER; note = 2'-O-methyl-uridine
  modified_base 10: mod_base = OTHER; note = 2'-fluoro-guanosine
  modified_base 11: mod_base = OTHER; note = 2'-O-methyl-adenosine
  modified_base 12: mod_base = OTHER; note = 2'-O-methyl-cytidine
  modified_base 13: mod_base = OTHER; note = 2'-O-methyl-adenosine
  modified_base 14: mod_base = OTHER; note = 2'-fluoro-uridine
  modified_base 15: mod_base = OTHER; note = 2'-O-methyl-guanosine
  modified_base 16: mod_base = OTHER; note = 2'-fluoro-uridine
  modified_base 17: mod_base = OTHER; note = 2'-O-methyl-cytidine
  modified_base 18: mod_base = OTHER; note = 2'-O-methyl-cytidine
  modified_base 19: mod_base = OTHER; note = 2'-O-methyl-uridine
  modified_base 20: mod_base = OTHER; note = 2'-O-methyl-uridine with phosphorothioate linkage
  modified_base 21: mod_base = OTHER; note = 2'-O-methyl-cytidine with phosphorothioate linkage
  modified_base 22: mod_base = OTHER; note = 2'-O-methyl-cytidine
tccaagactgacatgtccttcc

SEQ ID NO: 663 - RNA, 22 nt, synthetic construct
  source 1..22: mol_type = other RNA
  modified_base 1: mod_base = OTHER; note = 2'-O-methyl-uridine with phosphorothioate linkage
  modified_base 2: mod_base = OTHER; note = 2'-fluoro-cytidine with phosphorothioate linkage
  modified_base 3: mod_base = OTHER; note = 2'-fluoro-adenosine
  modified_base 4: mod_base = OTHER; note = 2'-O-methyl-adenosine
  modified_base 5: mod_base = OTHER; note = 2'-fluoro-guanosine
  modified_base 6: mod_base = OTHER; note = 2'-O-methyl-cytidine
  modified_base 7: mod_base = OTHER; note = 2'-fluoro-uridine
  modified_base 8: mod_base = OTHER; note = 2'-O-methyl-uridine
  modified_base 9: mod_base = OTHER; note = 2'-O-methyl-guanosine
  modified_base 10: mod_base = OTHER; note = 2'-fluoro-guanosine
  modified_base 11: mod_base = OTHER; note = 2'-O-methyl-cytidine
  modified_base 12: mod_base = OTHER; note = 2'-O-methyl-adenosine
  modified_base 13: mod_base = OTHER; note = 2'-O-methyl-adenosine
  modified_base 14: mod_base = OTHER; note = 2'-fluoro-guanosine
  modified_base 15: mod_base = OTHER; note = 2'-O-methyl-uridine
  modified_base 16: mod_base = OTHER; note = 2'-fluoro-uridine
  modified_base 17: mod_base = OTHER; note = 2'-O-methyl-cytidine
  modified_base 18: mod_base = OTHER; note = 2'-O-methyl-uridine
  modified_base 19: mod_base = OTHER; note = 2'-O-methyl-uridine
  modified_base 20: mod_base = OTHER; note = 2'-O-methyl-cytidine with phosphorothioate linkage
  modified_base 21: mod_base = OTHER; note = 2'-O-methyl-cytidine with phosphorothioate linkage
  modified_base 22: mod_base = OTHER; note = 2'-O-methyl-uridine
tcaagcttggcaagttcttcct

SEQ ID NO: 664 - RNA, 22 nt, synthetic construct
  source 1..22: mol_type = other RNA
  modified_base 1: mod_base = OTHER; note = 2'-O-methyl-uridine with phosphorothioate linkage
  modified_base 2: mod_base = OTHER; note = 2'-fluoro-guanosine with phosphorothioate linkage
  modified_base 3: mod_base = OTHER; note = 2'-fluoro-adenosine
  modified_base 4: mod_base = OTHER; note = 2'-O-methyl-guanosine
  modified_base 5: mod_base = OTHER; note = 2'-fluoro-guanosine
  modified_base 6: mod_base = OTHER; note = 2'-O-methyl-adenosine
  modified_base 7: mod_base = OTHER; note = 2'-fluoro-cytidine
  modified_base 8: mod_base = OTHER; note = 2'-O-methyl-cytidine
  modified_base 9: mod_base = OTHER; note = 2'-O-methyl-adenosine
  modified_base 10: mod_base = OTHER; note = 2'-fluoro-adenosine
  modified_base 11: mod_base = OTHER; note = 2'-O-methyl-guanosine
  modified_base 12: mod_base = OTHER; note = 2'-O-methyl-adenosine
  modified_base 13: mod_base = OTHER; note = 2'-O-methyl-cytidine
  modified_base 14: mod_base = OTHER; note = 2'-fluoro-uridine
  modified_base 15: mod_base = OTHER; note = 2'-O-methyl-guanosine
  modified_base 16: mod_base = OTHER; note = 2'-fluoro-adenosine
  modified_base 17: mod_base = OTHER; note = 2'-O-methyl-cytidine
  modified_base 18: mod_base = OTHER; note = 2'-O-methyl-adenosine
  modified_base 19: mod_base = OTHER; note = 2'-O-methyl-uridine
  modified_base 20: mod_base = OTHER; note = 2'-O-methyl-guanosine with phosphorothioate linkage
  modified_base 21: mod_base = OTHER; note = 2'-O-methyl-uridine with phosphorothioate linkage
  modified_base 22: mod_base = OTHER; note = 2'-O-methyl-cytidine
tgaggaccaagactgacatgtc

SEQ ID NO: 665 - RNA, 22 nt, synthetic construct
  source 1..22: mol_type = other RNA
  modified_base 1: mod_base = OTHER; note = 2'-O-methyl-uridine with phosphorothioate linkage
  modified_base 2: mod_base = OTHER; note = 2'-fluoro-adenosine with phosphorothioate linkage
  modified_base 3: mod_base = OTHER; note = 2'-fluoro-guanosine
  modified_base 4: mod_base = OTHER; note = 2'-O-methyl-adenosine
  modified_base 5: mod_base = OTHER; note = 2'-fluoro-uridine
  modified_base 6: mod_base = OTHER; note = 2'-O-methyl-guanosine
  modified_base 7: mod_base = OTHER; note = 2'-fluoro-adenosine
  modified_base 8: mod_base = OTHER; note = 2'-O-methyl-cytidine
  modified_base 9: mod_base = OTHER; note = 2'-O-methyl-cytidine
  modified_base 10: mod_base = OTHER; note = 2'-fluoro-adenosine
  modified_base 11: mod_base = OTHER; note = 2'-O-methyl-adenosine
  modified_base 12: mod_base = OTHER; note = 2'-O-methyl-guanosine
  modified_base 13: mod_base = OTHER; note = 2'-O-methyl-cytidine
  modified_base 14: mod_base = OTHER; note = 2'-fluoro-uridine
  modified_base 15: mod_base = OTHER; note = 2'-O-methyl-uridine
  modified_base 16: mod_base = OTHER; note = 2'-fluoro-guanosine
  modified_base 17: mod_base = OTHER; note = 2'-O-methyl-guanosine
  modified_base 18: mod_base = OTHER; note = 2'-O-methyl-cytidine
  modified_base 19: mod_base = OTHER; note = 2'-O-methyl-adenosine
  modified_base 20: mod_base = OTHER; note = 2'-O-methyl-adenosine with phosphorothioate linkage
  modified_base 21: mod_base = OTHER; note = 2'-O-methyl-guanosine with phosphorothioate linkage
  modified_base 22: mod_base = OTHER; note = 2'-O-methyl-uridine
tagatgaccaagcttggcaagt

SEQ ID NO: 666 - RNA, 22 nt, synthetic construct
  source 1..22: mol_type = other RNA
  modified_base 1: mod_base = OTHER; note = 2'-O-methyl-uridine with phosphorothioate linkage
  modified_base 2: mod_base = OTHER; note = 2'-fluoro-adenosine with phosphorothioate linkage
  modified_base 3: mod_base = OTHER; note = 2'-fluoro-guanosine
  modified_base 4: mod_base = OTHER; note = 2'-O-methyl-guanosine
  modified_base 5: mod_base = OTHER; note = 2'-fluoro-uridine
  modified_base 6: mod_base = OTHER; note = 2'-O-methyl-uridine
  modified_base 7: mod_base = OTHER; note = 2'-fluoro-guanosine
  modified_base 8: mod_base = OTHER; note = 2'-O-methyl-cytidine
  modified_base 9: mod_base = OTHER; note = 2'-O-methyl-adenosine
  modified_base 10: mod_base = OTHER; note = 2'-fluoro-guanosine
  modified_base 11: mod_base = OTHER; note = 2'-O-methyl-uridine
  modified_base 12: mod_base = OTHER; note = 2'-O-methyl-adenosine
  modified_base 13: mod_base = OTHER; note = 2'-O-methyl-cytidine
  modified_base 14: mod_base = OTHER; note = 2'-fluoro-uridine
  modified_base 15: mod_base = OTHER; note = 2'-O-methyl-cytidine
  modified_base 16: mod_base = OTHER; note = 2'-fluoro-cytidine
  modified_base 17: mod_base = OTHER; note = 2'-O-methyl-cytidine
  modified_base 18: mod_base = OTHER; note = 2'-O-methyl-adenosine
  modified_base 19: mod_base = OTHER; note = 2'-O-methyl-cytidine
  modified_base 20: mod_base = OTHER; note = 2'-O-methyl-cytidine with phosphorothioate linkage
  modified_base 21: mod_base = OTHER; note = 2'-O-methyl-uridine with phosphorothioate linkage
  modified_base 22: mod_base = OTHER; note = 2'-O-methyl-guanosine
taggttgcagtactcccacctg

SEQ ID NO: 667 - RNA, 22 nt, synthetic construct
  source 1..22: mol_type = other RNA
  modified_base 1: mod_base = OTHER; note = 2'-O-methyl-uridine with phosphorothioate linkage
  modified_base 2: mod_base = OTHER; note = 2'-fluoro-cytidine with phosphorothioate linkage
  modified_base 3: mod_base = OTHER; note = 2'-fluoro-adenosine
  modified_base 4: mod_base = OTHER; note = 2'-O-methyl-uridine
  modified_base 5: mod_base = OTHER; note = 2'-fluoro-adenosine
  modified_base 6: mod_base = OTHER; note = 2'-O-methyl-guanosine
  modified_base 7: mod_base = OTHER; note = 2'-fluoro-adenosine
  modified_base 8: mod_base = OTHER; note = 2'-O-methyl-guanosine
  modified_base 9: mod_base = OTHER; note = 2'-O-methyl-guanosine
  modified_base 10: mod_base = OTHER; note = 2'-fluoro-adenosine
  modified_base 11: mod_base = OTHER; note = 2'-O-methyl-cytidine
  modified_base 12: mod_base = OTHER; note = 2'-O-methyl-cytidine
  modified_base 13: mod_base = OTHER; note = 2'-O-methyl-adenosine
  modified_base 14: mod_base = OTHER; note = 2'-fluoro-adenosine
  modified_base 15: mod_base = OTHER; note = 2'-O-methyl-guanosine
  modified_base 16: mod_base = OTHER; note = 2'-fluoro-adenosine
  modified_base 17: mod_base = OTHER; note = 2'-O-methyl-cytidine
  modified_base 18: mod_base = OTHER; note = 2'-O-methyl-uridine
  modified_base 19: mod_base = OTHER; note = 2'-O-methyl-guanosine
  modified_base 20: mod_base = OTHER; note = 2'-O-methyl-adenosine with phosphorothioate linkage
  modified_base 21: mod_base = OTHER; note = 2'-O-methyl-cytidine with phosphorothioate linkage
  modified_base 22: mod_base = OTHER; note = 2'-O-methyl-adenosine
tcatagaggaccaagactgaca

SEQ ID NO: 668 - RNA, 22 nt, synthetic construct
  source 1..22: mol_type = other RNA
  modified_base 1: mod_base = OTHER; note = 2'-O-methyl-uridine with phosphorothioate linkage
  modified_base 2: mod_base = OTHER; note = 2'-fluoro-guanosine with phosphorothioate linkage
  modified_base 3: mod_base = OTHER; note = 2'-fluoro-adenosine
  modified_base 4: mod_base = OTHER; note = 2'-O-methyl-guanosine
  modified_base 5: mod_base = OTHER; note = 2'-fluoro-adenosine
  modified_base 6: mod_base = OTHER; note = 2'-O-methyl-adenosine
  modified_base 7: mod_base = OTHER; note = 2'-fluoro-uridine
  modified_base 8: mod_base = OTHER; note = 2'-O-methyl-guanosine
  modified_base 9: mod_base = OTHER; note = 2'-O-methyl-uridine
  modified_base 10: mod_base = OTHER; note = 2'-fluoro-guanosine
  modified_base 11: mod_base = OTHER; note = 2'-O-methyl-cytidine
  modified_base 12: mod_base = OTHER; note = 2'-O-methyl-cytidine
  modified_base 13: mod_base = OTHER; note = 2'-O-methyl-uridine
  modified_base 14: mod_base = OTHER; note = 2'-fluoro-cytidine
  modified_base 15: mod_base = OTHER; note = 2'-O-methyl-guanosine
  modified_base 16: mod_base = OTHER; note = 2'-fluoro-adenosine
  modified_base 17: mod_base = OTHER; note = 2'-O-methyl-uridine
  modified_base 18: mod_base = OTHER; note = 2'-O-methyl-adenosine
  modified_base 19: mod_base = OTHER; note = 2'-O-methyl-adenosine
  modified_base 20: mod_base = OTHER; note = 2'-O-methyl-cytidine with phosphorothioate linkage
  modified_base 21: mod_base = OTHER; note = 2'-O-methyl-uridine with phosphorothioate linkage
  modified_base 22: mod_base = OTHER; note = 2'-O-methyl-cytidine
tgagaatgtgcctcgataactc

SEQ ID NO: 669 - RNA, 22 nt, synthetic construct
  source 1..22: mol_type = other RNA
  modified_base 1: mod_base = OTHER; note = 2'-O-methyl-uridine with phosphorothioate linkage
  modified_base 2: mod_base = OTHER; note = 2'-fluoro-adenosine with phosphorothioate linkage
  modified_base 3: mod_base = OTHER; note = 2'-fluoro-uridine
  modified_base 4: mod_base = OTHER; note = 2'-O-methyl-uridine
  modified_base 5: mod_base = OTHER; note = 2'-fluoro-guanosine
  modified_base 6: mod_base = OTHER; note = 2'-O-methyl-adenosine
  modified_base 7: mod_base = OTHER; note = 2'-fluoro-cytidine
  modified_base 8: mod_base = OTHER; note = 2'-O-methyl-adenosine
  modified_base 9: mod_base = OTHER; note = 2'-O-methyl-uridine
  modified_base 10: mod_base = OTHER; note = 2'-fluoro-guanosine
  modified_base 11: mod_base = OTHER; note = 2'-O-methyl-uridine
  modified_base 12: mod_base = OTHER; note = 2'-O-methyl-cytidine
  modified_base 13: mod_base = OTHER; note = 2'-O-methyl-cytidine
  modified_base 14: mod_base = OTHER; note = 2'-fluoro-uridine
  modified_base 15: mod_base = OTHER; note = 2'-O-methyl-uridine
  modified_base 16: mod_base = OTHER; note = 2'-fluoro-cytidine
  modified_base 17: mod_base = OTHER; note = 2'-O-methyl-cytidine
  modified_base 18: mod_base = OTHER; note = 2'-O-methyl-uridine
  modified_base 19: mod_base = OTHER; note = 2'-O-methyl-guanosine
  modified_base 20: mod_base = OTHER; note = 2'-O-methyl-uridine with phosphorothioate linkage
  modified_base 21: mod_base = OTHER; note = 2'-O-methyl-guanosine with phosphorothioate linkage
  modified_base 22: mod_base = OTHER; note = 2'-O-methyl-adenosine
tattgacatgtccttcctgtga

SEQ ID NO: 670 - RNA, 22 nt, synthetic construct
  source 1..22: mol_type = other RNA
  modified_base 1: mod_base = OTHER; note = 2'-O-methyl-uridine with phosphorothioate linkage
  modified_base 2: mod_base = OTHER; note = 2'-fluoro-adenosine with phosphorothioate linkage
  modified_base 3: mod_base = OTHER; note = 2'-fluoro-uridine
  modified_base 4: mod_base = OTHER; note = 2'-O-methyl-adenosine
  modified_base 5: mod_base = OTHER; note = 2'-fluoro-uridine
  modified_base 6: mod_base = OTHER; note = 2'-O-methyl-uridine
  modified_base 7: mod_base = OTHER; note = 2'-fluoro-cytidine
  modified_base 8: mod_base = OTHER; note = 2'-O-methyl-uridine
  modified_base 9: mod_base = OTHER; note = 2'-O-methyl-guanosine
  modified_base 10: mod_base = OTHER; note = 2'-fluoro-uridine
  modified_base 11: mod_base = OTHER; note = 2'-O-methyl-uridine
  modified_base 12: mod_base = OTHER; note = 2'-O-methyl-guanosine
  modified_base 13: mod_base = OTHER; note = 2'-O-methyl-uridine
  modified_base 14: mod_base = OTHER; note = 2'-fluoro-cytidine
  modified_base 15: mod_base = OTHER; note = 2'-O-methyl-cytidine
  modified_base 16: mod_base = OTHER; note = 2'-fluoro-uridine
  modified_base 17: mod_base = OTHER; note = 2'-O-methyl-cytidine
  modified_base 18: mod_base = OTHER; note = 2'-O-methyl-uridine
  modified_base 19: mod_base = OTHER; note = 2'-O-methyl-guanosine
  modified_base 20: mod_base = OTHER; note = 2'-O-methyl-adenosine with phosphorothioate linkage
  modified_base 21: mod_base = OTHER; note = 2'-O-methyl-uridine with phosphorothioate linkage
  modified_base 22: mod_base = OTHER; note = 2'-O-methyl-guanosine
tatattctgttgtcctctgatg

SEQ ID NO: 671 - RNA, 22 nt, synthetic construct
  source 1..22: mol_type = other RNA
  modified_base 1: mod_base = OTHER; note = 2'-O-methyl-uridine with phosphorothioate linkage
  modified_base 2: mod_base = OTHER; note = 2'-fluoro-guanosine with phosphorothioate linkage
  modified_base 3: mod_base = OTHER; note = 2'-fluoro-cytidine
  modified_base 4: mod_base = OTHER; note = 2'-O-methyl-cytidine
  modified_base 5: mod_base = OTHER; note = 2'-fluoro-adenosine
  modified_base 6: mod_base = OTHER; note = 2'-O-methyl-cytidine
  modified_base 7: mod_base = OTHER; note = 2'-fluoro-cytidine
  modified_base 8: mod_base = OTHER; note = 2'-O-methyl-adenosine
  modified_base 9: mod_base = OTHER; note = 2'-O-methyl-uridine
  modified_base 10: mod_base = OTHER; note = 2'-fluoro-uridine
  modified_base 11: mod_base = OTHER; note = 2'-O-methyl-uridine
  modified_base 12: mod_base = OTHER; note = 2'-O-methyl-guanosine
  modified_base 13: mod_base = OTHER; note = 2'-O-methyl-guanosine
  modified_base 14: mod_base = OTHER; note = 2'-fluoro-guanosine
  modified_base 15: mod_base = OTHER; note = 2'-O-methyl-uridine
  modified_base 16: mod_base = OTHER; note = 2'-fluoro-adenosine
  modified_base 17: mod_base = OTHER; note = 2'-O-methyl-guanosine
  modified_base 18: mod_base = OTHER; note = 2'-O-methyl-uridine
  modified_base 19: mod_base = OTHER; note = 2'-O-methyl-adenosine
  modified_base 20: mod_base = OTHER; note = 2'-O-methyl-uridine with phosphorothioate linkage
  modified_base 21: mod_base = OTHER; note = 2'-O-methyl-uridine with phosphorothioate linkage
  modified_base 22: mod_base = OTHER; note = 2'-O-methyl-cytidine
tgccaccatttgggtagtattc

SEQ ID NO: 672 - RNA, 22 nt, synthetic construct
  source 1..22: mol_type = other RNA
  modified_base 1: mod_base = OTHER; note = 2'-O-methyl-uridine with phosphorothioate linkage
  modified_base 2: mod_base = OTHER; note = 2'-fluoro-guanosine with phosphorothioate linkage
  modified_base 3: mod_base = OTHER; note = 2'-fluoro-uridine
  modified_base 4: mod_base = OTHER; note = 2'-O-methyl-adenosine
  modified_base 5: mod_base = OTHER; note = 2'-fluoro-guanosine
  modified_base 6: mod_base = OTHER; note = 2'-O-methyl-uridine
  modified_base 7: mod_base = OTHER; note = 2'-fluoro-uridine
  modified_base 8: mod_base = OTHER; note = 2'-O-methyl-uridine
  modified_base 9: mod_base = OTHER; note = 2'-O-methyl-uridine
  modified_base 10: mod_base = OTHER; note = 2'-fluoro-cytidine
  modified_base 11: mod_base = OTHER; note = 2'-O-methyl-uridine
  modified_base 12: mod_base = OTHER; note = 2'-O-methyl-guanosine
  modified_base 13: mod_base = OTHER; note = 2'-O-methyl-guanosine
  modified_base 14: mod_base = OTHER; note = 2'-fluoro-guanosine
  modified_base 15: mod_base = OTHER; note = 2'-O-methyl-guanosine
  modified_base 16: mod_base = OTHER; note = 2'-fluoro-uridine
  modified_base 17: mod_base = OTHER; note = 2'-O-methyl-cytidine
  modified_base 18: mod_base = OTHER; note = 2'-O-methyl-cytidine
  modified_base 19: mod_base = OTHER; note = 2'-O-methyl-guanosine
  modified_base 20: mod_base = OTHER; note = 2'-O-methyl-adenosine with phosphorothioate linkage
  modified_base 21: mod_base = OTHER; note = 2'-O-methyl-cytidine with phosphorothioate linkage
  modified_base 22: mod_base = OTHER; note = 2'-O-methyl-uridine
tgtagttttctggggtccgact

SEQ ID NO: 673 - RNA, 22 nt, synthetic construct
  source 1..22: mol_type = other RNA
  modified_base 1: mod_base = OTHER; note = 2'-O-methyl-uridine with phosphorothioate linkage
  modified_base 2: mod_base = OTHER; note = 2'-fluoro-cytidine with phosphorothioate linkage
  modified_base 3: mod_base = OTHER; note = 2'-fluoro-adenosine
  modified_base 4: mod_base = OTHER; note = 2'-O-methyl-cytidine
  modified_base 5: mod_base = OTHER; note = 2'-fluoro-uridine
  modified_base 6: mod_base = OTHER; note = 2'-O-methyl-guanosine
  modified_base 7: mod_base = OTHER; note = 2'-fluoro-guanosine
  modified_base 8: mod_base = OTHER; note = 2'-O-methyl-adenosine
  modified_base 9: mod_base = OTHER; note = 2'-O-methyl-cytidine
  modified_base 10: mod_base = OTHER; note = 2'-fluoro-adenosine
  modified_base 11: mod_base = OTHER; note = 2'-O-methyl-uridine
  modified_base 12: mod_base = OTHER; note = 2'-O-methyl-uridine
  modified_base 13: mod_base = OTHER; note = 2'-O-methyl-guanosine
  modified_base 14: mod_base = OTHER; note = 2'-fluoro-uridine
  modified_base 15: mod_base = OTHER; note = 2'-O-methyl-guanosine
  modified_base 16: mod_base = OTHER; note = 2'-fluoro-uridine
  modified_base 17: mod_base = OTHER; note = 2'-O-methyl-cytidine
  modified_base 18: mod_base = OTHER; note = 2'-O-methyl-adenosine
  modified_base 19: mod_base = OTHER; note = 2'-O-methyl-guanosine
  modified_base 20: mod_base = OTHER; note = 2'-O-methyl-guanosine with phosphorothioate linkage
  modified_base 21: mod_base = OTHER; note = 2'-O-methyl-uridine with phosphorothioate linkage
  modified_base 22: mod_base = OTHER; note = 2'-O-methyl-uridine
tcactggacattgtgtcaggtt

SEQ ID NO: 674 - RNA, 22 nt, synthetic construct
  source 1..22: mol_type = other RNA
  modified_base 1: mod_base = OTHER; note = 2'-O-methyl-uridine with phosphorothioate linkage
  modified_base 2: mod_base = OTHER; note = 2'-fluoro-cytidine with phosphorothioate linkage
  modified_base 3: mod_base = OTHER; note = 2'-fluoro-cytidine
  modified_base 4: mod_base = OTHER; note = 2'-O-methyl-adenosine
  modified_base 5: mod_base = OTHER; note = 2'-fluoro-guanosine
  modified_base 6: mod_base = OTHER; note = 2'-O-methyl-uridine
  modified_base 7: mod_base = OTHER; note = 2'-fluoro-guanosine
  modified_base 8: mod_base = OTHER; note = 2'-O-methyl-uridine
  modified_base 9: mod_base = OTHER; note = 2'-O-methyl-guanosine
  modified_base 10: mod_base = OTHER; note = 2'-fluoro-guanosine
  modified_base 11: mod_base = OTHER; note = 2'-O-methyl-uridine
  modified_base 12: mod_base = OTHER; note = 2'-O-methyl-guanosine
  modified_base 13: mod_base = OTHER; note = 2'-O-methyl-uridine
  modified_base 14: mod_base = OTHER; note = 2'-fluoro-cytidine
  modified_base 15: mod_base = OTHER; note = 2'-O-methyl-adenosine
  modified_base 16: mod_base = OTHER; note = 2'-fluoro-uridine
  modified_base 17: mod_base = OTHER; note = 2'-O-methyl-adenosine
  modified_base 18: mod_base = OTHER; note = 2'-O-methyl-guanosine
  modified_base 19: mod_base = OTHER; note = 2'-O-methyl-adenosine
  modified_base 20: mod_base = OTHER; note = 2'-O-methyl-guanosine with phosphorothioate linkage
  modified_base 21: mod_base = OTHER; note = 2'-O-methyl-guanosine with phosphorothioate linkage
  modified_base 22: mod_base = OTHER; note = 2'-O-methyl-adenosine
tccagtgtggtgtcatagagga

SEQ ID NO: 675 - RNA, 22 nt, synthetic construct
  source 1..22: mol_type = other RNA
  modified_base 1: mod_base = OTHER; note = 2'-O-methyl-uridine with phosphorothioate linkage
  modified_base 2: mod_base = OTHER; note = 2'-fluoro-guanosine with phosphorothioate linkage
  modified_base 3: mod_base = OTHER; note = 2'-fluoro-guanosine
  modified_base 4: mod_base = OTHER; note = 2'-O-methyl-adenosine
  modified_base 5: mod_base = OTHER; note = 2'-fluoro-cytidine
  modified_base 6: mod_base = OTHER; note = 2'-O-methyl-adenosine
  modified_base 7: mod_base = OTHER; note = 2'-fluoro-cytidine
  modified_base 8: mod_base = OTHER; note = 2'-O-methyl-uridine
  modified_base 9: mod_base = OTHER; note = 2'-O-methyl-uridine
  modified_base 10: mod_base = OTHER; note = 2'-fluoro-guanosine
  modified_base 11: mod_base = OTHER; note = 2'-O-methyl-adenosine
  modified_base 12: mod_base = OTHER; note = 2'-O-methyl-uridine
  modified_base 13: mod_base = OTHER; note = 2'-O-methyl-uridine
  modified_base 14: mod_base = OTHER; note = 2'-fluoro-cytidine
  modified_base 15: mod_base = OTHER; note = 2'-O-methyl-uridine
  modified_base 16: mod_base = OTHER; note = 2'-fluoro-guanosine
  modified_base 17: mod_base = OTHER; note = 2'-O-methyl-uridine
  modified_base 18: mod_base = OTHER; note = 2'-O-methyl-cytidine
  modified_base 19: mod_base = OTHER; note = 2'-O-methyl-adenosine
  modified_base 20: mod_base = OTHER; note = 2'-O-methyl-cytidine with phosphorothioate linkage
  modified_base 21: mod_base = OTHER; note = 2'-O-methyl-cytidine with phosphorothioate linkage
  modified_base 22: mod_base = OTHER; note = 2'-O-methyl-adenosine
tggacacttgattctgtcacca

SEQ ID NO: 676 - RNA, 22 nt, synthetic construct
  source 1..22: mol_type = other RNA
  modified_base 1: mod_base = OTHER; note = 2'-O-methyl-uridine with phosphorothioate linkage
  modified_base 2: mod_base = OTHER; note = 2'-fluoro-guanosine with phosphorothioate linkage
  modified_base 3: mod_base = OTHER; note = 2'-fluoro-uridine
  modified_base 4: mod_base = OTHER; note = 2'-O-methyl-uridine
  modified_base 5: mod_base = OTHER; note = 2'-fluoro-guanosine
  modified_base 6: mod_base = OTHER; note = 2'-O-methyl-cytidine
  modified_base 7: mod_base = OTHER; note = 2'-fluoro-adenosine
  modified_base 8: mod_base = OTHER; note = 2'-O-methyl-adenosine
  modified_base 9: mod_base = OTHER; note = 2'-O-methyl-guanosine
  modified_base 10: mod_base = OTHER; note = 2'-fluoro-guanosine
  modified_base 11: mod_base = OTHER; note = 2'-O-methyl-adenosine
  modified_base 12: mod_base = OTHER; note = 2'-O-methyl-cytidine
  modified_base 13: mod_base = OTHER; note = 2'-O-methyl-adenosine
  modified_base 14: mod_base = OTHER; note = 2'-fluoro-cytidine
  modified_base 15: mod_base = OTHER; note = 2'-O-methyl-uridine
  modified_base 16: mod_base = OTHER; note = 2'-fluoro-uridine
  modified_base 17: mod_base = OTHER; note = 2'-O-methyl-guanosine
  modified_base 18: mod_base = OTHER; note = 2'-O-methyl-adenosine
  modified_base 19: mod_base = OTHER; note = 2'-O-methyl-uridine
  modified_base 20: mod_base = OTHER; note = 2'-O-methyl-uridine with phosphorothioate linkage
  modified_base 21: mod_base = OTHER; note = 2'-O-methyl-cytidine with phosphorothioate linkage
  modified_base 22: mod_base = OTHER; note = 2'-O-methyl-uridine
tgttgcaaggacacttgattct

SEQ ID NO: 677 - RNA, 22 nt, synthetic construct
  source 1..22: mol_type = other RNA
  modified_base 1: mod_base = OTHER; note = 2'-O-methyl-uridine with phosphorothioate linkage
  modified_base 2: mod_base = OTHER; note = 2'-fluoro-guanosine with phosphorothioate linkage
  modified_base 3: mod_base = OTHER; note = 2'-fluoro-cytidine
  modified_base 4: mod_base = OTHER; note = 2'-O-methyl-adenosine
  modified_base 5: mod_base = OTHER; note = 2'-fluoro-adenosine
  modified_base 6: mod_base = OTHER; note = 2'-O-methyl-uridine
  modified_base 7: mod_base = OTHER; note = 2'-fluoro-cytidine
  modified_base 8: mod_base = OTHER; note = 2'-O-methyl-cytidine
  modified_base 9: mod_base = OTHER; note = 2'-O-methyl-uridine
  modified_base 10: mod_base = OTHER; note = 2'-fluoro-guanosine
  modified_base 11: mod_base = OTHER; note = 2'-O-methyl-guanosine
  modified_base 12: mod_base = OTHER; note = 2'-O-methyl-adenosine
  modified_base 13: mod_base = OTHER; note = 2'-O-methyl-cytidine
  modified_base 14: mod_base = OTHER; note = 2'-fluoro-cytidine
  modified_base 15: mod_base = OTHER; note = 2'-O-methyl-adenosine
  modified_base 16: mod_base = OTHER; note = 2'-fluoro-cytidine
  modified_base 17: mod_base = OTHER; note = 2'-O-methyl-adenosine
  modified_base 18: mod_base = OTHER; note = 2'-O-methyl-uridine
  modified_base 19: mod_base = OTHER; note = 2'-O-methyl-guanosine
  modified_base 20: mod_base = OTHER; note = 2'-O-methyl-guanosine with phosphorothioate linkage
  modified_base 21: mod_base = OTHER; note = 2'-O-methyl-cytidine with phosphorothioate linkage
  modified_base 22: mod_base = OTHER; note = 2'-O-methyl-uridine
tgcaatcctggaccacatggct

SEQ ID NO: 678 - RNA, 22 nt, synthetic construct
  source 1..22: mol_type = other RNA
  modified_base 1: mod_base = OTHER; note = 2'-O-methyl-uridine with phosphorothioate linkage
  modified_base 2: mod_base = OTHER; note = 2'-fluoro-cytidine with phosphorothioate linkage
  modified_base 3: mod_base = OTHER; note = 2'-fluoro-adenosine
  modified_base 4: mod_base = OTHER; note = 2'-O-methyl-adenosine
  modified_base 5: mod_base = OTHER; note = 2'-fluoro-guanosine
  modified_base 6: mod_base = OTHER; note = 2'-O-methyl-cytidine
  modified_base 7: mod_base = OTHER; note = 2'-fluoro-uridine
  modified_base 8: mod_base = OTHER; note = 2'-O-methyl-uridine
  modified_base 9: mod_base = OTHER; note = 2'-O-methyl-guanosine
  modified_base 10: mod_base = OTHER; note = 2'-fluoro-guanosine
  modified_base 11: mod_base = OTHER; note = 2'-O-methyl-cytidine
  modified_base 12: mod_base = OTHER; note = 2'-O-methyl-adenosine
  modified_base 13: mod_base = OTHER; note = 2'-O-methyl-guanosine
  modified_base 14: mod_base = OTHER; note = 2'-fluoro-guanosine
  modified_base 15: mod_base = OTHER; note = 2'-O-methyl-uridine
  modified_base 16: mod_base = OTHER; note = 2'-fluoro-uridine
  modified_base 17: mod_base = OTHER; note = 2'-O-methyl-cytidine
  modified_base 18: mod_base = OTHER; note = 2'-O-methyl-uridine
  modified_base 19: mod_base = OTHER; note = 2'-O-methyl-uridine
  modified_base 20: mod_base = OTHER; note = 2'-O-methyl-cytidine with phosphorothioate linkage
  modified_base 21: mod_base = OTHER; note = 2'-O-methyl-cytidine with phosphorothioate linkage
  modified_base 22: mod_base = OTHER; note = 2'-O-methyl-uridine
tcaagcttggcaggttcttcct

SEQ ID NO: 679 - RNA, 22 nt, synthetic construct
  source 1..22: mol_type = other RNA
  modified_base 1: mod_base = OTHER; note = 2'-O-methyl-uridine with phosphorothioate linkage
  modified_base 2: mod_base = OTHER; note = 2'-fluoro-guanosine with phosphorothioate linkage
  modified_base 3: mod_base = OTHER; note = 2'-fluoro-adenosine
  modified_base 4: mod_base = OTHER; note = 2'-O-methyl-uridine
  modified_base 5: mod_base = OTHER; note = 2'-fluoro-cytidine
  modified_base 6: mod_base = OTHER; note = 2'-O-methyl-cytidine
  modified_base 7: mod_base = OTHER; note = 2'-fluoro-adenosine
  modified_base 8: mod_base = OTHER; note = 2'-O-methyl-uridine
  modified_base 9: mod_base = OTHER; note = 2'-O-methyl-guanosine
  modified_base 10: mod_base = OTHER; note = 2'-fluoro-guanosine
  modified_base 11: mod_base = OTHER; note = 2'-O-methyl-uridine
  modified_base 12: mod_base = OTHER; note = 2'-O-methyl-guanosine
  modified_base 13: mod_base = OTHER; note = 2'-O-methyl-uridine
  modified_base 14: mod_base = OTHER; note = 2'-fluoro-adenosine
  modified_base 15: mod_base = OTHER; note = 2'-O-methyl-adenosine
  modified_base 16: mod_base = OTHER; note = 2'-fluoro-cytidine
  modified_base 17: mod_base = OTHER; note = 2'-O-methyl-adenosine
  modified_base 18: mod_base = OTHER; note = 2'-O-methyl-cytidine
  modified_base 19: mod_base = OTHER; note = 2'-O-methyl-cytidine
  modified_base 20: mod_base = OTHER; note = 2'-O-methyl-adenosine with phosphorothioate linkage
  modified_base 21: mod_base = OTHER; note = 2'-O-methyl-adenosine with phosphorothioate linkage
  modified_base 22: mod_base = OTHER; note = 2'-O-methyl-guanosine
tgatccatggtgtaacaccaag

SEQ ID NO: 680 - RNA, 22 nt, synthetic construct
  source 1..22: mol_type = other RNA
  modified_base 1: mod_base = OTHER; note = 2'-O-methyl-uridine with phosphorothioate linkage
  modified_base 2: mod_base = OTHER; note = 2'-fluoro-uridine with phosphorothioate linkage
  modified_base 3: mod_base = OTHER; note = 2'-fluoro-adenosine
  modified_base 4: mod_base = OTHER; note = 2'-O-methyl-adenosine
  modified_base 5: mod_base = OTHER; note = 2'-fluoro-uridine
  modified_base 6: mod_base = OTHER; note = 2'-O-methyl-adenosine
  modified_base 7: mod_base = OTHER; note = 2'-fluoro-uridine
  modified_base 8: mod_base = OTHER; note = 2'-O-methyl-uridine
  modified_base 9: mod_base = OTHER; note = 2'-O-methyl-cytidine
  modified_base 10: mod_base = OTHER; note = 2'-fluoro-uridine
  modified_base 11: mod_base = OTHER; note = 2'-O-methyl-guanosine
  modified_base 12: mod_base = OTHER; note = 2'-O-methyl-uridine
  modified_base 13: mod_base = OTHER; note = 2'-O-methyl-uridine
  modified_base 14: mod_base = OTHER; note = 2'-fluoro-guanosine
  modified_base 15: mod_base = OTHER; note = 2'-O-methyl-uridine
  modified_base 16: mod_base = OTHER; note = 2'-fluoro-cytidine
  modified_base 17: mod_base = OTHER; note = 2'-O-methyl-cytidine
  modified_base 18: mod_base = OTHER; note = 2'-O-methyl-uridine
  modified_base 19: mod_base = OTHER; note = 2'-O-methyl-cytidine
  modified_base 20: mod_base = OTHER; note = 2'-O-methyl-uridine with phosphorothioate linkage
  modified_base 21: mod_base = OTHER; note = 2'-O-methyl-guanosine with phosphorothioate linkage
  modified_base 22: mod_base = OTHER; note = 2'-O-methyl-adenosine
ttaatattctgttgtcctctga

SEQ ID NO: 681 - RNA, 22 nt, synthetic construct
  source 1..22: mol_type = other RNA
  modified_base 1: mod_base = OTHER; note = 2'-O-methyl-uridine with phosphorothioate linkage
  modified_base 2: mod_base = OTHER; note = 2'-fluoro-uridine with phosphorothioate linkage
  modified_base 3: mod_base = OTHER; note = 2'-fluoro-adenosine
  modified_base 4: mod_base = OTHER; note = 2'-O-methyl-adenosine
  modified_base 5: mod_base = OTHER; note = 2'-fluoro-cytidine
  modified_base 6: mod_base = OTHER; note = 2'-O-methyl-adenosine
  modified_base 7: mod_base = OTHER; note = 2'-fluoro-cytidine
  modified_base 8: mod_base = OTHER; note = 2'-O-methyl-cytidine
  modified_base 9: mod_base = OTHER; note = 2'-O-methyl-adenosine
  modified_base 10: mod_base = OTHER; note = 2'-fluoro-adenosine
  modified_base 11: mod_base = OTHER; note = 2'-O-methyl-guanosine
  modified_base 12: mod_base = OTHER; note = 2'-O-methyl-guanosine
  modified_base 13: mod_base = OTHER; note = 2'-O-methyl-guanosine
  modified_base 14: mod_base = OTHER; note = 2'-fluoro-guanosine
  modified_base 15: mod_base = OTHER; note = 2'-O-methyl-cytidine
  modified_base 16: mod_base = OTHER; note = 2'-fluoro-uridine
  modified_base 17: mod_base = OTHER; note = 2'-O-methyl-guanosine
  modified_base 18: mod_base = OTHER; note = 2'-O-methyl-cytidine
  modified_base 19: mod_base = OTHER; note = 2'-O-methyl-cytidine
  modified_base 20: mod_base = OTHER; note = 2'-O-methyl-adenosine with phosphorothioate linkage
  modified_base 21: mod_base = OTHER; note = 2'-O-methyl-cytidine with phosphorothioate linkage
  modified_base 22: mod_base = OTHER; note = 2'-O-methyl-adenosine
ttaacaccaaggggctgccaca

SEQ ID NO: 682 - RNA, 22 nt, synthetic construct
  source 1..22: mol_type = other RNA
  modified_base 1: mod_base = OTHER; note = 2'-O-methyl-uridine with phosphorothioate linkage
  modified_base 2: mod_base = OTHER; note = 2'-fluoro-cytidine with phosphorothioate linkage
  modified_base 3: mod_base = OTHER; note = 2'-fluoro-cytidine
  modified_base 4: mod_base = OTHER; note = 2'-O-methyl-adenosine
  modified_base 5: mod_base = OTHER; note = 2'-fluoro-uridine
  modified_base 6: mod_base = OTHER; note = 2'-O-methyl-cytidine
  modified_base 7: mod_base = OTHER; note = 2'-fluoro-adenosine
  modified_base 8: mod_base = OTHER; note = 2'-O-methyl-cytidine
  modified_base 9: mod_base = OTHER; note = 2'-O-methyl-cytidine
  modified_base 10: mod_base = OTHER; note = 2'-fluoro-adenosine
  modified_base 11: mod_base = OTHER; note = 2'-O-methyl-uridine
  modified_base 12: mod_base = OTHER; note = 2'-O-methyl-guanosine
  modified_base 13: mod_base = OTHER; note = 2'-O-methyl-guanosine
  modified_base 14: mod_base = OTHER; note = 2'-fluoro-uridine
  modified_base 15: mod_base = OTHER; note = 2'-O-methyl-adenosine
  modified_base 16: mod_base = OTHER; note = 2'-fluoro-guanosine
  modified_base 17: mod_base = OTHER; note = 2'-O-methyl-cytidine
  modified_base 18: mod_base = OTHER; note = 2'-O-methyl-adenosine
  modified_base 19: mod_base = OTHER; note = 2'-O-methyl-adenosine
  modified_base 20: mod_base = OTHER; note = 2'-O-methyl-uridine with phosphorothioate linkage
  modified_base 21: mod_base = OTHER; note = 2'-O-methyl-cytidine with phosphorothioate linkage
  modified_base 22: mod_base = OTHER; note = 2'-O-methyl-cytidine
tccatcaccatggtagcaatcc

SEQ ID NO: 683 - RNA, 22 nt, synthetic construct
  source 1..22: mol_type = other RNA
  modified_base 1: mod_base = OTHER; note = 2'-O-methyl-uridine with phosphorothioate linkage
  modified_base 2: mod_base = OTHER; note = 2'-fluoro-cytidine with phosphorothioate linkage
  modified_base 3: mod_base = OTHER; note = 2'-fluoro-uridine
  modified_base 4: mod_base = OTHER; note = 2'-O-methyl-cytidine
  modified_base 5: mod_base = OTHER; note = 2'-fluoro-adenosine
  modified_base 6: mod_base = OTHER; note = 2'-O-methyl-guanosine
  modified_base 7: mod_base = OTHER; note = 2'-fluoro-cytidine
  modified_base 8: mod_base = OTHER; note = 2'-O-methyl-adenosine
  modified_base 9: mod_base = OTHER; note = 2'-O-methyl-uridine
  modified_base 10: mod_base = OTHER; note = 2'-fluoro-cytidine
  modified_base 11: mod_base = OTHER; note = 2'-O-methyl-uridine
  modified_base 12: mod_base = OTHER; note = 2'-O-methyl-guanosine
  modified_base 13: mod_base = OTHER; note = 2'-O-methyl-guanosine
  modified_base 14: mod_base = OTHER; note = 2'-fluoro-adenosine
  modified_base 15: mod_base = OTHER; note = 2'-O-methyl-uridine
  modified_base 16: mod_base = OTHER; note = 2'-fluoro-uridine
  modified_base 17: mod_base = OTHER; note = 2'-O-methyl-cytidine
  modified_base 18: mod_base = OTHER; note = 2'-O-methyl-cytidine
  modified_base 19: mod_base = OTHER; note = 2'-O-methyl-uridine
  modified_base 20: mod_base = OTHER; note = 2'-O-methyl-guanosine with phosphorothioate linkage
  modified_base 21: mod_base = OTHER; note = 2'-O-methyl-cytidine with phosphorothioate linkage
  modified_base 22: mod_base = OTHER; note = 2'-O-methyl-adenosine
tctcagcatctggattcctgca

SEQ ID NO: 684 - RNA, 22 nt, synthetic construct
  source 1..22: mol_type = other RNA
  modified_base 1: mod_base = OTHER; note = 2'-O-methyl-uridine with phosphorothioate linkage
  modified_base 2: mod_base = OTHER; note = 2'-fluoro-cytidine with phosphorothioate linkage
  modified_base 3: mod_base = OTHER; note = 2'-fluoro-adenosine
  modified_base 4: mod_base = OTHER; note = 2'-O-methyl-cytidine
  modified_base 5: mod_base = OTHER; note = 2'-fluoro-adenosine
  modified_base 6: mod_base = OTHER; note = 2'-O-methyl-guanosine
  modified_base 7: mod_base = OTHER; note = 2'-fluoro-guanosine
  modified_base 8: mod_base = OTHER; note = 2'-O-methyl-adenosine
  modified_base 9: mod_base = OTHER; note = 2'-O-methyl-uridine
  modified_base 10: mod_base = OTHER; note = 2'-fluoro-cytidine
  modified_base 11: mod_base = OTHER; note = 2'-O-methyl-uridine
  modified_base 12: mod_base = OTHER; note = 2'-O-methyl-guanosine
  modified_base 13: mod_base = OTHER; note = 2'-O-methyl-guanosine
  modified_base 14: mod_base = OTHER; note = 2'-fluoro-adenosine
  modified_base 15: mod_base = OTHER; note = 2'-O-methyl-uridine
  modified_base 16: mod_base = OTHER; note = 2'-fluoro-uridine
  modified_base 17: mod_base = OTHER; note = 2'-O-methyl-cytidine
  modified_base 18: mod_base = OTHER; note = 2'-O-methyl-cytidine
  modified_base 19: mod_base = OTHER; note = 2'-O-methyl-uridine
  modified_base 20: mod_base = OTHER; note = 2'-O-methyl-guanosine with phosphorothioate linkage
  modified_base 21: mod_base = OTHER; note = 2'-O-methyl-cytidine with phosphorothioate linkage
  modified_base 22: mod_base = OTHER; note = 2'-O-methyl-adenosine
tcacaggatctggattcctgca

SEQ ID NO: 685 - RNA, 22 nt, synthetic construct
  source 1..22: mol_type = other RNA
  modified_base 1: mod_base = OTHER; note = 2'-O-methyl-uridine with phosphorothioate linkage
  modified_base 2: mod_base = OTHER; note = 2'-fluoro-guanosine with phosphorothioate linkage
  modified_base 3: mod_base = OTHER; note = 2'-fluoro-guanosine
  modified_base 4: mod_base = OTHER; note = 2'-O-methyl-cytidine
  modified_base 5: mod_base = OTHER; note = 2'-fluoro-adenosine
  modified_base 6: mod_base = OTHER; note = 2'-O-methyl-guanosine
  modified_base 7: mod_base = OTHER; note = 2'-fluoro-guanosine
  modified_base 8: mod_base = OTHER; note = 2'-O-methyl-uridine
  modified_base 9: mod_base = OTHER; note = 2'-O-methyl-cytidine
  modified_base 10: mod_base = OTHER; note = 2'-fluoro-cytidine
  modified_base 11: mod_base = OTHER; note = 2'-O-methyl-uridine
  modified_base 12: mod_base = OTHER; note = 2'-O-methyl-uridine
  modified_base 13: mod_base = OTHER; note = 2'-O-methyl-cytidine
  modified_base 14: mod_base = OTHER; note = 2'-fluoro-cytidine
  modified_base 15: mod_base = OTHER; note = 2'-O-methyl-uridine
  modified_base 16: mod_base = OTHER; note = 2'-fluoro-guanosine
  modified_base 17: mod_base = OTHER; note = 2'-O-methyl-uridine
  modified_base 18: mod_base = OTHER; note = 2'-O-methyl-guanosine
  modified_base 19: mod_base = OTHER; note = 2'-O-methyl-adenosine
  modified_base 20: mod_base = OTHER; note = 2'-O-methyl-cytidine with phosphorothioate linkage
  modified_base 21: mod_base = OTHER; note = 2'-O-methyl-adenosine with phosphorothioate linkage
  modified_base 22: mod_base = OTHER; note = 2'-O-methyl-guanosine
tggcaggtccttcctgtgacag

SEQ ID NO: 686 - RNA, 22 nt, synthetic construct
  source 1..22: mol_type = other RNA
  modified_base 1: mod_base = OTHER; note = 2'-O-methyl-uridine with phosphorothioate linkage
  modified_base 2: mod_base = OTHER; note = 2'-fluoro-guanosine with phosphorothioate linkage
  modified_base 3: mod_base = OTHER; note = 2'-fluoro-adenosine
  modified_base 4: mod_base = OTHER; note = 2'-O-methyl-cytidine
  modified_base 5: mod_base = OTHER; note = 2'-fluoro-uridine
  modified_base 6: mod_base = OTHER; note = 2'-O-methyl-guanosine
  modified_base 7: mod_base = OTHER; note = 2'-fluoro-adenosine
  modified_base 8: mod_base = OTHER; note = 2'-O-methyl-cytidine
  modified_base 9: mod_base = OTHER; note = 2'-O-methyl-adenosine
  modified_base 10: mod_base = OTHER; note = 2'-fluoro-uridine
  modified_base 11: mod_base = OTHER; note = 2'-O-methyl-guanosine
  modified_base 12: mod_base = OTHER; note = 2'-O-methyl-uridine
  modified_base 13: mod_base = OTHER; note = 2'-O-methyl-cytidine
  modified_base 14: mod_base = OTHER; note = 2'-fluoro-cytidine
  modified_base 15: mod_base = OTHER; note = 2'-O-methyl-uridine
  modified_base 16: mod_base = OTHER; note = 2'-fluoro-uridine
  modified_base 17: mod_base = OTHER; note = 2'-O-methyl-cytidine
  modified_base 18: mod_base = OTHER; note = 2'-O-methyl-cytidine
  modified_base 19: mod_base = OTHER; note = 2'-O-methyl-uridine
  modified_base 20: mod_base = OTHER; note = 2'-O-methyl-guanosine with phosphorothioate linkage
  modified_base 21: mod_base = OTHER; note = 2'-O-methyl-uridine with phosphorothioate linkage
  modified_base 22: mod_base = OTHER; note = 2'-O-methyl-adenosine
tgactgacatgtccttcctgta

SEQ ID NO: 687 - RNA, 22 nt, synthetic construct
  source 1..22: mol_type = other RNA
  modified_base 1: mod_base = OTHER; note = 2'-O-methyl-uridine with phosphorothioate linkage
  modified_base 2: mod_base = OTHER; note = 2'-fluoro-adenosine with phosphorothioate linkage
  modified_base 3: mod_base = OTHER; note = 2'-fluoro-uridine
  modified_base 4: mod_base = OTHER; note = 2'-O-methyl-uridine
  modified_base 5: mod_base = OTHER; note = 2'-fluoro-cytidine
  modified_base 6: mod_base = OTHER; note = 2'-O-methyl-cytidine
  modified_base 7: mod_base = OTHER; note = 2'-fluoro-uridine
  modified_base 8: mod_base = OTHER; note = 2'-O-methyl-guanosine
  modified_base 9: mod_base = OTHER; note = 2'-O-methyl-cytidine
  modified_base 10: mod_base = OTHER; note = 2'-fluoro-adenosine
  modified_base 11: mod_base = OTHER; note = 2'-O-methyl-guanosine
  modified_base 12: mod_base = OTHER; note = 2'-O-methyl-uridine
  modified_base 13: mod_base = OTHER; note = 2'-O-methyl-adenosine
  modified_base 14: mod_base = OTHER; note = 2'-fluoro-guanosine
  modified_base 15: mod_base = OTHER; note = 2'-O-methyl-uridine
  modified_base 16: mod_base = OTHER; note = 2'-fluoro-uridine
  modified_base 17: mod_base = OTHER; note = 2'-O-methyl-cytidine
  modified_base 18: mod_base = OTHER; note = 2'-O-methyl-cytidine
  modified_base 19: mod_base = OTHER; note = 2'-O-methyl-uridine
  modified_base 20: mod_base = OTHER; note = 2'-O-methyl-guanosine with phosphorothioate linkage
  modified_base 21: mod_base = OTHER; note = 2'-O-methyl-guanosine with phosphorothioate linkage
  modified_base 22: mod_base = OTHER; note = 2'-O-methyl-uridine
tattcctgcagtagttcctggt

SEQ ID NO: 688 - RNA, 22 nt, synthetic construct
  source 1..22: mol_type = other RNA
  modified_base 1: mod_base = OTHER; note = 2'-O-methyl-uridine with phosphorothioate linkage
  modified_base 2: mod_base = OTHER; note = 2'-fluoro-cytidine with phosphorothioate linkage
  modified_base 3: mod_base = OTHER; note = 2'-fluoro-adenosine
  modified_base 4: mod_base = OTHER; note = 2'-O-methyl-uridine
  modified_base 5: mod_base = OTHER; note = 2'-fluoro-uridine
  modified_base 6: mod_base = OTHER; note = 2'-O-methyl-guanosine
  modified_base 7: mod_base = OTHER; note = 2'-fluoro-uridine
  modified_base 8: mod_base = OTHER; note = 2'-O-methyl-guanosine
  modified_base 9: mod_base = OTHER; note = 2'-O-methyl-uridine
  modified_base 10: mod_base = OTHER; note = 2'-fluoro-cytidine
  modified_base 11: mod_base = OTHER; note = 2'-O-methyl-adenosine
  modified_base 12: mod_base = OTHER; note = 2'-O-methyl-guanosine
  modified_base 13: mod_base = OTHER; note = 2'-O-methyl-guanosine
  modified_base 14: mod_base = OTHER; note = 2'-fluoro-uridine
  modified_base 15: mod_base = OTHER; note = 2'-O-methyl-uridine
  modified_base 16: mod_base = OTHER; note = 2'-fluoro-guanosine
  modified_base 17: mod_base = OTHER; note = 2'-O-methyl-cytidine
  modified_base 18: mod_base = OTHER; note = 2'-O-methyl-adenosine
  modified_base 19: mod_base = OTHER; note = 2'-O-methyl-guanosine
  modified_base 20: mod_base = OTHER; note = 2'-O-methyl-uridine with phosphorothioate linkage
  modified_base 21: mod_base = OTHER; note = 2'-O-methyl-adenosine with phosphorothioate linkage
  modified_base 22: mod_base = OTHER; note = 2'-O-methyl-cytidine
tcattgtgtcaggttgcagtac

SEQ ID NO: 689 - RNA, 22 nt, synthetic construct
  source 1..22: mol_type = other RNA
  modified_base 1: mod_base = OTHER; note = 2'-O-methyl-uridine with phosphorothioate linkage
  modified_base 2: mod_base = OTHER; note = 2'-fluoro-cytidine with phosphorothioate linkage
  modified_base 3: mod_base = OTHER; note = 2'-fluoro-adenosine
  modified_base 4: mod_base = OTHER; note = 2'-O-methyl-adenosine
  modified_base 5: mod_base = OTHER; note = 2'-fluoro-guanosine
  modified_base 6: mod_base = OTHER; note = 2'-O-methyl-cytidine
  modified_base 7: mod_base = OTHER; note = 2'-fluoro-cytidine
  modified_base 8: mod_base = OTHER; note = 2'-O-methyl-adenosine
  modified_base 9: mod_base = OTHER; note = 2'-O-methyl-guanosine
  modified_base 10: mod_base = OTHER; note = 2'-fluoro-cytidine
  modified_base 11: mod_base = OTHER; note = 2'-O-methyl-adenosine
  modified_base 12: mod_base = OTHER; note = 2'-O-methyl-uridine
  modified_base 13: mod_base = OTHER; note = 2'-O-methyl-uridine
  modified_base 14: mod_base = OTHER; note = 2'-fluoro-uridine
  modified_base 15: mod_base = OTHER; note = 2'-O-methyl-guanosine
  modified_base 16: mod_base = OTHER; note = 2'-fluoro-guanosine
  modified_base 17: mod_base = OTHER; note = 2'-O-methyl-guanosine
  modified_base 18: mod_base = OTHER; note = 2'-O-methyl-uridine
  modified_base 19: mod_base = OTHER; note = 2'-O-methyl-adenosine
  modified_base 20: mod_base = OTHER; note = 2'-O-methyl-guanosine with phosphorothioate linkage
  modified_base 21: mod_base = OTHER; note = 2'-O-methyl-uridine with phosphorothioate linkage
  modified_base 22: mod_base = OTHER; note = 2'-O-methyl-adenosine
tcaagccagcatttgggtagta

SEQ ID NO: 690 - RNA, 22 nt, synthetic construct
  source 1..22: mol_type = other RNA
  modified_base 1: mod_base = OTHER; note = 2'-O-methyl-uridine with phosphorothioate linkage
  modified_base 2: mod_base = OTHER; note = 2'-fluoro-guanosine with phosphorothioate linkage
  modified_base 3: mod_base = OTHER; note = 2'-fluoro-adenosine
  modified_base 4: mod_base = OTHER; note = 2'-O-methyl-cytidine
  modified_base 5: mod_base = OTHER; note = 2'-fluoro-adenosine
  modified_base 6: mod_base = OTHER; note = 2'-O-methyl-cytidine
  modified_base 7: mod_base = OTHER; note = 2'-fluoro-uridine
  modified_base 8: mod_base = OTHER; note = 2'-O-methyl-guanosine
  modified_base 9: mod_base = OTHER; note = 2'-O-methyl-guanosine
  modified_base 10: mod_base = OTHER; note = 2'-fluoro-guanosine
  modified_base 11: mod_base = OTHER; note = 2'-O-methyl-adenosine
  modified_base 12: mod_base = OTHER; note = 2'-O-methyl-uridine
  modified_base 13: mod_base = OTHER; note = 2'-O-methyl-cytidine
  modified_base 14: mod_base = OTHER; note = 2'-fluoro-cytidine
  modified_base 15: mod_base = OTHER; note = 2'-O-methyl-adenosine
  modified_base 16: mod_base = OTHER; note = 2'-fluoro-uridine
  modified_base 17: mod_base = OTHER; note = 2'-O-methyl-guanosine
  modified_base 18: mod_base = OTHER; note = 2'-O-methyl-guanosine
  modified_base 19: mod_base = OTHER; note = 2'-O-methyl-uridine
  modified_base 20: mod_base = OTHER; note = 2'-O-methyl-guanosine with phosphorothioate linkage
  modified_base 21: mod_base = OTHER; note = 2'-O-methyl-uridine with phosphorothioate linkage
  modified_base 22: mod_base = OTHER; note = 2'-O-methyl-adenosine
tgacactgggatccatggtgta

SEQ ID NO: 691 - RNA, 22 nt, synthetic construct
  source 1..22: mol_type = other RNA
  modified_base 1: mod_base = OTHER; note = 2'-O-methyl-uridine with phosphorothioate linkage
  modified_base 2: mod_base = OTHER; note = 2'-fluoro-guanosine with phosphorothioate linkage
  modified_base 3: mod_base = OTHER; note = 2'-fluoro-adenosine
  modified_base 4: mod_base = OTHER; note = 2'-O-methyl-cytidine
  modified_base 5: mod_base = OTHER; note = 2'-fluoro-cytidine
  modified_base 6: mod_base = OTHER; note = 2'-O-methyl-adenosine
  modified_base 7: mod_base = OTHER; note = 2'-fluoro-adenosine
  modified_base 8: mod_base = OTHER; note = 2'-O-methyl-guanosine
  modified_base 9: mod_base = OTHER; note = 2'-O-methyl-cytidine
  modified_base 10: mod_base = OTHER; note = 2'-fluoro-uridine
  modified_base 11: mod_base = OTHER; note = 2'-O-methyl-uridine
  modified_base 12: mod_base = OTHER; note = 2'-O-methyl-guanosine
  modified_base 13: mod_base = OTHER; note = 2'-O-methyl-guanosine
  modified_base 14: mod_base = OTHER; note = 2'-fluoro-cytidine
  modified_base 15: mod_base = OTHER; note = 2'-O-methyl-adenosine
  modified_base 16: mod_base = OTHER; note = 2'-fluoro-adenosine
  modified_base 17: mod_base = OTHER; note = 2'-O-methyl-guanosine
  modified_base 18: mod_base = OTHER; note = 2'-O-methyl-uridine
  modified_base 19: mod_base = OTHER; note = 2'-O-methyl-uridine
  modified_base 20: mod_base = OTHER; note = 2'-O-methyl-cytidine with phosphorothioate linkage
  modified_base 21: mod_base = OTHER; note = 2'-O-methyl-uridine with phosphorothioate linkage
  modified_base 22: mod_base = OTHER; note = 2'-O-methyl-uridine
tgaccaagcttggcaagttctt

SEQ ID NO: 692 - RNA, 22 nt, synthetic construct
  source 1..22: mol_type = other RNA
  modified_base 1: mod_base = OTHER; note = 2'-O-methyl-uridine with phosphorothioate linkage
  modified_base 2: mod_base = OTHER; note = 2'-fluoro-uridine with phosphorothioate linkage
  modified_base 3: mod_base = OTHER; note = 2'-fluoro-cytidine
  modified_base 4: mod_base = OTHER; note = 2'-O-methyl-uridine
  modified_base 5: mod_base = OTHER; note = 2'-fluoro-guanosine
  modified_base 6: mod_base = OTHER; note = 2'-O-methyl-adenosine
  modified_base 7: mod_base = OTHER; note = 2'-fluoro-guanosine
  modified_base 8: mod_base = OTHER; note = 2'-O-methyl-cytidine
  modified_base 9: mod_base = OTHER; note = 2'-O-methyl-adenosine
  modified_base 10: mod_base = OTHER; note = 2'-fluoro-uridine
  modified_base 11: mod_base = OTHER; note = 2'-O-methyl-uridine
  modified_base 12: mod_base = OTHER; note = 2'-O-methyl-guanosine
  modified_base 13: mod_base = OTHER; note = 2'-O-methyl-uridine
  modified_base 14: mod_base = OTHER; note = 2'-fluoro-guanosine
  modified_base 15: mod_base = OTHER; note = 2'-O-methyl-uridine
  modified_base 16: mod_base = OTHER; note = 2'-fluoro-cytidine
  modified_base 17: mod_base = OTHER; note = 2'-O-methyl-adenosine
  modified_base 18: mod_base = OTHER; note = 2'-O-methyl-guanosine
  modified_base 19: mod_base = OTHER; note = 2'-O-methyl-guanosine
  modified_base 20: mod_base = OTHER; note = 2'-O-methyl-uridine with phosphorothioate linkage
  modified_base 21: mod_base = OTHER; note = 2'-O-methyl-uridine with phosphorothioate linkage
  modified_base 22: mod_base = OTHER; note = 2'-O-methyl-guanosine
ttctgagcattgtgtcaggttg

SEQ ID NO: 693 - RNA, 22 nt, synthetic construct
  source 1..22: mol_type = other RNA
  modified_base 1: mod_base = OTHER; note = 2'-O-methyl-uridine with phosphorothioate linkage
  modified_base 2: mod_base = OTHER; note = 2'-fluoro-guanosine with phosphorothioate linkage
  modified_base 3: mod_base = OTHER; note = 2'-fluoro-cytidine
  modified_base 4: mod_base = OTHER; note = 2'-O-methyl-adenosine
  modified_base 5: mod_base = OTHER; note = 2'-fluoro-uridine
  modified_base 6: mod_base = OTHER; note = 2'-O-methyl-uridine
  modified_base 7: mod_base = OTHER; note = 2'-fluoro-guanosine
  modified_base 8: mod_base = OTHER; note = 2'-O-methyl-uridine
  modified_base 9: mod_base = OTHER; note = 2'-O-methyl-guanosine
  modified_base 10: mod_base = OTHER; note = 2'-fluoro-uridine
  modified_base 11: mod_base = OTHER; note = 2'-O-methyl-cytidine
  modified_base 12: mod_base = OTHER; note = 2'-O-methyl-adenosine
  modified_base 13: mod_base = OTHER; note = 2'-O-methyl-guanosine
  modified_base 14: mod_base = OTHER; note = 2'-fluoro-guanosine
  modified_base 15: mod_base = OTHER; note = 2'-O-methyl-uridine
  modified_base 16: mod_base = OTHER; note = 2'-fluoro-uridine
  modified_base 17: mod_base = OTHER; note = 2'-O-methyl-guanosine
  modified_base 18: mod_base = OTHER; note = 2'-O-methyl-cytidine
  modified_base 19: mod_base = OTHER; note = 2'-O-methyl-adenosine
  modified_base 20: mod_base = OTHER; note = 2'-O-methyl-guanosine with phosphorothioate linkage
  modified_base 21: mod_base = OTHER; note = 2'-O-methyl-uridine with phosphorothioate linkage
  modified_base 22: mod_base = OTHER; note = 2'-O-methyl-adenosine
tgcattgtgtcaggttgcagta

SEQ ID NO: 694 - RNA, 22 nt, synthetic construct
  source 1..22: mol_type = other RNA
  modified_base 1: mod_base = OTHER; note = 2'-O-methyl-uridine with phosphorothioate linkage
  modified_base 2: mod_base = OTHER; note = 2'-fluoro-uridine with phosphorothioate linkage
  modified_base 3: mod_base = OTHER; note = 2'-fluoro-uridine
  modified_base 4: mod_base = OTHER; note = 2'-O-methyl-guanosine
  modified_base 5: mod_base = OTHER; note = 2'-fluoro-cytidine
  modified_base 6: mod_base = OTHER; note = 2'-O-methyl-uridine
  modified_base 7: mod_base = OTHER; note = 2'-fluoro-cytidine
  modified_base 8: mod_base = OTHER; note = 2'-O-methyl-adenosine
  modified_base 9: mod_base = OTHER; note = 2'-O-methyl-guanosine
  modified_base 10: mod_base = OTHER; note = 2'-fluoro-uridine
  modified_base 11: mod_base = OTHER; note = 2'-O-methyl-uridine
  modified_base 12: mod_base = OTHER; note = 2'-O-methyl-guanosine
  modified_base 13: mod_base = OTHER; note = 2'-O-methyl-guanosine
  modified_base 14: mod_base = OTHER; note = 2'-fluoro-uridine
  modified_base 15: mod_base = OTHER; note = 2'-O-methyl-guanosine
  modified_base 16: mod_base = OTHER; note = 2'-fluoro-cytidine
  modified_base 17: mod_base = OTHER; note = 2'-O-methyl-uridine
  modified_base 18: mod_base = OTHER; note = 2'-O-methyl-uridine
  modified_base 19: mod_base = OTHER; note = 2'-O-methyl-guanosine
  modified_base 20: mod_base = OTHER; note = 2'-O-methyl-uridine with phosphorothioate linkage
  modified_base 21: mod_base = OTHER; note = 2'-O-methyl-uridine with phosphorothioate linkage
  modified_base 22: mod_base = OTHER; note = 2'-O-methyl-cytidine
tttgctcagttggtgcttgttc

SEQ ID NO: 695 - RNA, 22 nt, synthetic construct
  source 1..22: mol_type = other RNA
  modified_base 1: mod_base = OTHER; note = 2'-O-methyl-uridine with phosphorothioate linkage
  modified_base 2: mod_base = OTHER; note = 2'-fluoro-cytidine with phosphorothioate linkage
  modified_base 3: mod_base = OTHER; note = 2'-fluoro-adenosine
  modified_base 4: mod_base = OTHER; note = 2'-O-methyl-uridine
  modified_base 5: mod_base = OTHER; note = 2'-fluoro-guanosine
  modified_base 6: mod_base = OTHER; note = 2'-O-methyl-guanosine
  modified_base 7: mod_base = OTHER; note = 2'-fluoro-uridine
  modified_base 8: mod_base = OTHER; note = 2'-O-methyl-adenosine
  modified_base 9: mod_base = OTHER; note = 2'-O-methyl-uridine
  modified_base 10: mod_base = OTHER; note = 2'-fluoro-adenosine
  modified_base 11: mod_base = OTHER; note = 2'-O-methyl-adenosine
  modified_base 12: mod_base = OTHER; note = 2'-O-methyl-cytidine
  modified_base 13: mod_base = OTHER; note = 2'-O-methyl-adenosine
  modified_base 14: mod_base = OTHER; note = 2'-fluoro-cytidine
  modified_base 15: mod_base = OTHER; note = 2'-O-methyl-cytidine
  modified_base 16: mod_base = OTHER; note = 2'-fluoro-adenosine
  modified_base 17: mod_base = OTHER; note = 2'-O-methyl-adenosine
  modified_base 18: mod_base = OTHER; note = 2'-O-methyl-guanosine
  modified_base 19: mod_base = OTHER; note = 2'-O-methyl-guanosine
  modified_base 20: mod_base = OTHER; note = 2'-O-methyl-guanosine with phosphorothioate linkage
  modified_base 21: mod_base = OTHER; note = 2'-O-methyl-cytidine with phosphorothioate linkage
  modified_base 22: mod_base = OTHER; note = 2'-O-methyl-guanosine
tcatggtataacaccaagggcg

SEQ ID NO: 696 - RNA, 22 nt, synthetic construct
  source 1..22: mol_type = other RNA
  modified_base 1: mod_base = OTHER; note = 2'-O-methyl-uridine with phosphorothioate linkage
  modified_base 2: mod_base = OTHER; note = 2'-fluoro-adenosine with phosphorothioate linkage
  modified_base 3: mod_base = OTHER; note = 2'-fluoro-adenosine
  modified_base 4: mod_base = OTHER; note = 2'-O-methyl-cytidine
  modified_base 5: mod_base = OTHER; note = 2'-fluoro-uridine
  modified_base 6: mod_base = OTHER; note = 2'-O-methyl-cytidine
  modified_base 7: mod_base = OTHER; note = 2'-fluoro-uridine
  modified_base 8: mod_base = OTHER; note = 2'-O-methyl-guanosine
  modified_base 9: mod_base = OTHER; note = 2'-O-methyl-uridine
  modified_base 10: mod_base = OTHER; note = 2'-fluoro-cytidine
  modified_base 11: mod_base = OTHER; note = 2'-O-methyl-cytidine
  modified_base 12: mod_base = OTHER; note = 2'-O-methyl-adenosine
  modified_base 13: mod_base = OTHER; note = 2'-O-methyl-uridine
  modified_base 14: mod_base = OTHER; note = 2'-fluoro-adenosine
  modified_base 15: mod_base = OTHER; note = 2'-O-methyl-adenosine
  modified_base 16: mod_base = OTHER; note = 2'-fluoro-uridine
  modified_base 17: mod_base = OTHER; note = 2'-O-methyl-guanosine
  modified_base 18: mod_base = OTHER; note = 2'-O-methyl-guanosine
  modified_base 19: mod_base = OTHER; note = 2'-O-methyl-uridine
  modified_base 20: mod_base = OTHER; note = 2'-O-methyl-adenosine with phosphorothioate linkage
  modified_base 21: mod_base = OTHER; note = 2'-O-methyl-guanosine with phosphorothioate linkage
  modified_base 22: mod_base = OTHER; note = 2'-O-methyl-uridine
taactctgtccataatggtagt

SEQ ID NO: 697 - RNA, 22 nt, synthetic construct
  source 1..22: mol_type = other RNA
  modified_base 1: mod_base = OTHER; note = 2'-O-methyl-uridine with phosphorothioate linkage
  modified_base 2: mod_base = OTHER; note = 2'-fluoro-cytidine with phosphorothioate linkage
  modified_base 3: mod_base = OTHER; note = 2'-fluoro-adenosine
  modified_base 4: mod_base = OTHER; note = 2'-O-methyl-guanosine
  modified_base 5: mod_base = OTHER; note = 2'-fluoro-guanosine
  modified_base 6: mod_base = OTHER; note = 2'-O-methyl-adenosine
  modified_base 7: mod_base = OTHER; note = 2'-fluoro-uridine
  modified_base 8: mod_base = OTHER; note = 2'-O-methyl-cytidine
  modified_base 9: mod_base = OTHER; note = 2'-O-methyl-uridine
  modified_base 10: mod_base = OTHER; note = 2'-fluoro-guanosine
  modified_base 11: mod_base = OTHER; note = 2'-O-methyl-guanosine
  modified_base 12: mod_base = OTHER; note = 2'-O-methyl-adenosine
  modified_base 13: mod_base = OTHER; note = 2'-O-methyl-uridine
  modified_base 14: mod_base = OTHER; note = 2'-fluoro-uridine
  modified_base 15: mod_base = OTHER; note = 2'-O-methyl-uridine
  modified_base 16: mod_base = OTHER; note = 2'-fluoro-cytidine
  modified_base 17: mod_base = OTHER; note = 2'-O-methyl-guanosine
  modified_base 18: mod_base = OTHER; note = 2'-O-methyl-guanosine
  modified_base 19: mod_base = OTHER; note = 2'-O-methyl-cytidine
  modified_base 20: mod_base = OTHER; note = 2'-O-methyl-adenosine with phosphorothioate linkage
  modified_base 21: mod_base = OTHER; note = 2'-O-methyl-guanosine with phosphorothioate linkage
  modified_base 22: mod_base = OTHER; note = 2'-O-methyl-uridine
tcaggatctggatttcggcagt

SEQ ID NO: 698 - RNA, 22 nt, synthetic construct
  source 1..22: mol_type = other RNA
  modified_base 1: mod_base = OTHER; note = 2'-O-methyl-uridine with phosphorothioate linkage
  modified_base 2: mod_base = OTHER; note = 2'-fluoro-guanosine with phosphorothioate linkage
  modified_base 3: mod_base = OTHER; note = 2'-fluoro-adenosine
  modified_base 4: mod_base = OTHER; note = 2'-O-methyl-adenosine
  modified_base 5: mod_base = OTHER; note = 2'-fluoro-uridine
  modified_base 6: mod_base = OTHER; note = 2'-O-methyl-cytidine
  modified_base 7: mod_base = OTHER; note = 2'-fluoro-uridine
  modified_base 8: mod_base = OTHER; note = 2'-O-methyl-cytidine
  modified_base 9: mod_base = OTHER; note = 2'-O-methyl-adenosine
  modified_base 10: mod_base = OTHER; note = 2'-fluoro-guanosine
  modified_base 11: mod_base = OTHER; note = 2'-O-methyl-cytidine
  modified_base 12: mod_base = OTHER; note = 2'-O-methyl-adenosine
  modified_base 13: mod_base = OTHER; note = 2'-O-methyl-uridine
  modified_base 14: mod_base = OTHER; note = 2'-fluoro-cytidine
  modified_base 15: mod_base = OTHER; note = 2'-O-methyl-uridine
  modified_base 16: mod_base = OTHER; note = 2'-fluoro-guanosine
  modified_base 17: mod_base = OTHER; note = 2'-O-methyl-guanosine
  modified_base 18: mod_base = OTHER; note = 2'-O-methyl-adenosine
  modified_base 19: mod_base = OTHER; note = 2'-O-methyl-uridine
  modified_base 20: mod_base = OTHER; note = 2'-O-methyl-uridine with phosphorothioate linkage
  modified_base 21: mod_base = OTHER; note = 2'-O-methyl-cytidine with phosphorothioate linkage
  modified_base 22: mod_base = OTHER; note = 2'-O-methyl-cytidine
tgaatctcagcatctggattcc

SEQ ID NO: 699 - RNA, 22 nt, synthetic construct
  source 1..22: mol_type = other RNA
  modified_base 1: mod_base = OTHER; note = 2'-O-methyl-uridine with phosphorothioate linkage
  modified_base 2: mod_base = OTHER; note = 2'-fluoro-uridine with phosphorothioate linkage
  modified_base 3: mod_base = OTHER; note = 2'-fluoro-guanosine
  modified_base 4: mod_base = OTHER; note = 2'-O-methyl-guanosine
  modified_base 5: mod_base = OTHER; note = 2'-fluoro-uridine
  modified_base 6: mod_base = OTHER; note = 2'-O-methyl-guanosine
  modified_base 7: mod_base = OTHER; note = 2'-fluoro-guanosine
  modified_base 8: mod_base = OTHER; note = 2'-O-methyl-adenosine
  modified_base 9: mod_base = OTHER; note = 2'-O-methyl-guanosine
  modified_base 10: mod_base = OTHER; note = 2'-fluoro-adenosine
  modified_base 11: mod_base = OTHER; note = 2'-O-methyl-adenosine
  modified_base 12: mod_base = OTHER; note = 2'-O-methyl-uridine
  modified_base 13: mod_base = OTHER; note = 2'-O-methyl-guanosine
  modified_base 14: mod_base = OTHER; note = 2'-fluoro-uridine
  modified_base 15: mod_base = OTHER; note = 2'-O-methyl-guanosine
  modified_base 16: mod_base = OTHER; note = 2'-fluoro-cytidine
  modified_base 17: mod_base = OTHER; note = 2'-O-methyl-cytidine
  modified_base 18: mod_base = OTHER; note = 2'-O-methyl-uridine
  modified_base 19: mod_base = OTHER; note = 2'-O-methyl-cytidine
  modified_base 20: mod_base = OTHER; note = 2'-O-methyl-guanosine with phosphorothioate linkage
  modified_base 21: mod_base = OTHER; note = 2'-O-methyl-adenosine with phosphorothioate linkage
  modified_base 22: mod_base = OTHER; note = 2'-O-methyl-uridine
ttggtggagaatgtgcctcgat

SEQ ID NO: 700 - RNA, 22 nt, synthetic construct
  source 1..22: mol_type = other RNA
  modified_base 1: mod_base = OTHER; note = 2'-O-methyl-uridine with phosphorothioate linkage
  modified_base 2: mod_base = OTHER; note = 2'-fluoro-uridine with phosphorothioate linkage
  modified_base 3: mod_base = OTHER; note = 2'-fluoro-cytidine
  modified_base 4: mod_base = OTHER; note = 2'-O-methyl-adenosine
  modified_base 5: mod_base = OTHER; note = 2'-fluoro-guanosine
  modified_base 6: mod_base = OTHER; note = 2'-O-methyl-guanosine
  modified_base 7: mod_base = OTHER; note = 2'-fluoro-cytidine
  modified_base 8: mod_base = OTHER; note = 2'-O-methyl-cytidine
  modified_base 9: mod_base = OTHER; note = 2'-O-methyl-adenosine
  modified_base 10: mod_base = OTHER; note = 2'-fluoro-guanosine
  modified_base 11: mod_base = OTHER; note = 2'-O-methyl-cytidine
  modified_base 12: mod_base = OTHER; note = 2'-O-methyl-adenosine
  modified_base 13: mod_base = OTHER; note = 2'-O-methyl-uridine
  modified_base 14: mod_base = OTHER; note = 2'-fluoro-uridine
  modified_base 15: mod_base = OTHER; note = 2'-O-methyl-uridine
  modified_base 16: mod_base = OTHER; note = 2'-fluoro-guanosine
  modified_base 17: mod_base = OTHER; note = 2'-O-methyl-guanosine
  modified_base 18: mod_base = OTHER; note = 2'-O-methyl-guanosine
  modified_base 19: mod_base = OTHER; note = 2'-O-methyl-uridine
  modified_base 20: mod_base = OTHER; note = 2'-O-methyl-adenosine with phosphorothioate linkage
  modified_base 21: mod_base = OTHER; note = 2'-O-methyl-guanosine with phosphorothioate linkage
  modified_base 22: mod_base = OTHER; note = 2'-O-methyl-uridine
ttcaggccagcatttgggtagt

SEQ ID NO: 701 - RNA, 22 nt, synthetic construct
  source 1..22: mol_type = other RNA
  modified_base 1: mod_base = OTHER; note = 2'-O-methyl-uridine with phosphorothioate linkage
  modified_base 2: mod_base = OTHER; note = 2'-fluoro-guanosine with phosphorothioate linkage
  modified_base 3: mod_base = OTHER; note = 2'-fluoro-cytidine
  modified_base 4: mod_base = OTHER; note = 2'-O-methyl-adenosine
  modified_base 5: mod_base = OTHER; note = 2'-fluoro-uridine
  modified_base 6: mod_base = OTHER; note = 2'-O-methyl-cytidine
  modified_base 7: mod_base = OTHER; note = 2'-fluoro-uridine
  modified_base 8: mod_base = OTHER; note = 2'-O-methyl-guanosine
  modified_base 9: mod_base = OTHER; note = 2'-O-methyl-guanosine
  modified_base 10: mod_base = OTHER; note = 2'-fluoro-adenosine
  modified_base 11: mod_base = OTHER; note = 2'-O-methyl-uridine
  modified_base 12: mod_base = OTHER; note = 2'-O-methyl-uridine
  modified_base 13: mod_base = OTHER; note = 2'-O-methyl-cytidine
  modified_base 14: mod_base = OTHER; note = 2'-fluoro-cytidine
  modified_base 15: mod_base = OTHER; note = 2'-O-methyl-uridine
  modified_base 16: mod_base = OTHER; note = 2'-fluoro-guanosine
  modified_base 17: mod_base = OTHER; note = 2'-O-methyl-cytidine
  modified_base 18: mod_base = OTHER; note = 2'-O-methyl-adenosine
  modified_base 19: mod_base = OTHER; note = 2'-O-methyl-guanosine
  modified_base 20: mod_base = OTHER; note = 2'-O-methyl-uridine with phosphorothioate linkage
  modified_base 21: mod_base = OTHER; note = 2'-O-methyl-adenosine with phosphorothioate linkage
  modified_base 22: mod_base = OTHER; note = 2'-O-methyl-guanosine
tgcatctggattcctgcagtag

SEQ ID NO: 702 - RNA, 22 nt, synthetic construct
  source 1..22: mol_type = other RNA
  modified_base 1: mod_base = OTHER; note = 2'-O-methyl-uridine with phosphorothioate linkage
  modified_base 2: mod_base = OTHER; note = 2'-fluoro-uridine with phosphorothioate linkage
  modified_base 3: mod_base = OTHER; note = 2'-fluoro-guanosine
  modified_base 4: mod_base = OTHER; note = 2'-O-methyl-cytidine
  modified_base 5: mod_base = OTHER; note = 2'-fluoro-cytidine
  modified_base 6: mod_base = OTHER; note = 2'-O-methyl-uridine
  modified_base 7: mod_base = OTHER; note = 2'-fluoro-cytidine
  modified_base 8: mod_base = OTHER; note = 2'-O-methyl-guanosine
  modified_base 9: mod_base = OTHER; note = 2'-O-methyl-adenosine
  modified_base 10: mod_base = OTHER; note = 2'-fluoro-uridine
  modified_base 11: mod_base = OTHER; note = 2'-O-methyl-adenosine
  modified_base 12: mod_base = OTHER; note = 2'-O-methyl-adenosine
  modified_base 13: mod_base = OTHER; note = 2'-O-methyl-cytidine
  modified_base 14: mod_base = OTHER; note = 2'-fluoro-uridine
  modified_base 15: mod_base = OTHER; note = 2'-O-methyl-cytidine
  modified_base 16: mod_base = OTHER; note = 2'-fluoro-uridine
  modified_base 17: mod_base = OTHER; note = 2'-O-methyl-guanosine
  modified_base 18: mod_base = OTHER; note = 2'-O-methyl-uridine
  modified_base 19: mod_base = OTHER; note = 2'-O-methyl-cytidine
  modified_base 20: mod_base = OTHER; note = 2'-O-methyl-cytidine with phosphorothioate linkage
  modified_base 21: mod_base = OTHER; note = 2'-O-methyl-adenosine with phosphorothioate linkage
  modified_base 22: mod_base = OTHER; note = 2'-O-methyl-uridine
ttgcctcgataactctgtccat

SEQ ID NO: 703 - RNA, 22 nt, synthetic construct
  source 1..22: mol_type = other RNA
  modified_base 1: mod_base = OTHER; note = 2'-O-methyl-uridine with phosphorothioate linkage
  modified_base 2: mod_base = OTHER; note = 2'-fluoro-adenosine with phosphorothioate linkage
  modified_base 3: mod_base = OTHER; note = 2'-fluoro-guanosine
  modified_base 4: mod_base = OTHER; note = 2'-O-methyl-uridine
  modified_base 5: mod_base = OTHER; note = 2'-fluoro-cytidine
  modified_base 6: mod_base = OTHER; note = 2'-O-methyl-cytidine
  modified_base 7: mod_base = OTHER; note = 2'-fluoro-cytidine
  modified_base 8: mod_base = OTHER; note = 2'-O-methyl-uridine
  modified_base 9: mod_base = OTHER; note = 2'-O-methyl-uridine
  modified_base 10: mod_base = OTHER; note = 2'-fluoro-cytidine
  modified_base 11: mod_base = OTHER; note = 2'-O-methyl-uridine
  modified_base 12: mod_base = OTHER; note = 2'-O-methyl-guanosine
  modified_base 13: mod_base = OTHER; note = 2'-O-methyl-cytidine
  modified_base 14: mod_base = OTHER; note = 2'-fluoro-guanosine
  modified_base 15: mod_base = OTHER; note = 2'-O-methyl-uridine
  modified_base 16: mod_base = OTHER; note = 2'-fluoro-cytidine
  modified_base 17: mod_base = OTHER; note = 2'-O-methyl-uridine
  modified_base 18: mod_base = OTHER; note = 2'-O-methyl-guanosine
  modified_base 19: mod_base = OTHER; note = 2'-O-methyl-adenosine
  modified_base 20: mod_base = OTHER; note = 2'-O-methyl-guanosine with phosphorothioate linkage
  modified_base 21: mod_base = OTHER; note = 2'-O-methyl-cytidine with phosphorothioate linkage
  modified_base 22: mod_base = OTHER; note = 2'-O-methyl-adenosine
tagtcccttctgcgtctgagca

SEQ ID NO: 704 - RNA, 22 nt, synthetic construct
  source 1..22: mol_type = other RNA
  modified_base 1: mod_base = OTHER; note = 2'-O-methyl-uridine with phosphorothioate linkage
  modified_base 2: mod_base = OTHER; note = 2'-fluoro-guanosine with phosphorothioate linkage
  modified_base 3: mod_base = OTHER; note = 2'-fluoro-guanosine
  modified_base 4: mod_base = OTHER; note = 2'-O-methyl-adenosine
  modified_base 5: mod_base = OTHER; note = 2'-fluoro-uridine
  modified_base 6: mod_base = OTHER; note = 2'-O-methyl-uridine
  modified_base 7: mod_base = OTHER; note = 2'-fluoro-uridine
  modified_base 8: mod_base = OTHER; note = 2'-O-methyl-cytidine
  modified_base 9: mod_base = OTHER; note = 2'-O-methyl-guanosine
  modified_base 10: mod_base = OTHER; note = 2'-fluoro-guanosine
  modified_base 11: mod_base = OTHER; note = 2'-O-methyl-cytidine
  modified_base 12: mod_base = OTHER; note = 2'-O-methyl-adenosine
  modified_base 13: mod_base = OTHER; note = 2'-O-methyl-guanosine
  modified_base 14: mod_base = OTHER; note = 2'-fluoro-uridine
  modified_base 15: mod_base = OTHER; note = 2'-O-methyl-adenosine
  modified_base 16: mod_base = OTHER; note = 2'-fluoro-guanosine
  modified_base 17: mod_base = OTHER; note = 2'-O-methyl-uridine
  modified_base 18: mod_base = OTHER; note = 2'-O-methyl-uridine
  modified_base 19: mod_base = OTHER; note = 2'-O-methyl-cytidine
  modified_base 20: mod_base = OTHER; note = 2'-O-methyl-uridine with phosphorothioate linkage
  modified_base 21: mod_base = OTHER; note = 2'-O-methyl-uridine with phosphorothioate linkage
  modified_base 22: mod_base = OTHER; note = 2'-O-methyl-guanosine
tggatttcggcagtagttcttg

SEQ ID NO: 705 - RNA, 22 nt, synthetic construct
  source 1..22: mol_type = other RNA
  modified_base 1: mod_base = OTHER; note = 2'-O-methyl-uridine with phosphorothioate linkage
  modified_base 2: mod_base = OTHER; note = 2'-fluoro-guanosine with phosphorothioate linkage
  modified_base 3: mod_base = OTHER; note = 2'-fluoro-uridine
  modified_base 4: mod_base = OTHER; note = 2'-O-methyl-guanosine
  modified_base 5: mod_base = OTHER; note = 2'-fluoro-uridine
  modified_base 6: mod_base = OTHER; note = 2'-O-methyl-cytidine
  modified_base 7: mod_base = OTHER; note = 2'-fluoro-adenosine
  modified_base 8: mod_base = OTHER; note = 2'-O-methyl-uridine
  modified_base 9: mod_base = OTHER; note = 2'-O-methyl-adenosine
  modified_base 10: mod_base = OTHER; note = 2'-fluoro-guanosine
  modified_base 11: mod_base = OTHER; note = 2'-O-methyl-adenosine
  modified_base 12: mod_base = OTHER; note = 2'-O-methyl-uridine
  modified_base 13: mod_base = OTHER; note = 2'-O-methyl-guanosine
  modified_base 14: mod_base = OTHER; note = 2'-fluoro-adenosine
  modified_base 15: mod_base = OTHER; note = 2'-O-methyl-cytidine
  modified_base 16: mod_base = OTHER; note = 2'-fluoro-cytidine
  modified_base 17: mod_base = OTHER; note = 2'-O-methyl-adenosine
  modified_base 18: mod_base = OTHER; note = 2'-O-methyl-adenosine
  modified_base 19: mod_base = OTHER; note = 2'-O-methyl-guanosine
  modified_base 20: mod_base = OTHER; note = 2'-O-methyl-cytidine with phosphorothioate linkage
  modified_base 21: mod_base = OTHER; note = 2'-O-methyl-uridine with phosphorothioate linkage
  modified_base 22: mod_base = OTHER; note = 2'-O-methyl-uridine
tgtgtcatagatgaccaagctt

SEQ ID NO: 706 - RNA, 22 nt, synthetic construct
  source 1..22: mol_type = other RNA
  modified_base 1: mod_base = OTHER; note = 2'-O-methyl-uridine with phosphorothioate linkage
  modified_base 2: mod_base = OTHER; note = 2'-fluoro-cytidine with phosphorothioate linkage
  modified_base 3: mod_base = OTHER; note = 2'-fluoro-uridine
  modified_base 4: mod_base = OTHER; note = 2'-O-methyl-guanosine
  modified_base 5: mod_base = OTHER; note = 2'-fluoro-adenosine
  modified_base 6: mod_base = OTHER; note = 2'-O-methyl-cytidine
  modified_base 7: mod_base = OTHER; note = 2'-fluoro-adenosine
  modified_base 8: mod_base = OTHER; note = 2'-O-methyl-uridine
  modified_base 9: mod_base = OTHER; note = 2'-O-methyl-guanosine
  modified_base 10: mod_base = OTHER; note = 2'-fluoro-uridine
  modified_base 11: mod_base = OTHER; note = 2'-O-methyl-uridine
  modified_base 12: mod_base = OTHER; note = 2'-O-methyl-cytidine
  modified_base 13: mod_base = OTHER; note = 2'-O-methyl-uridine
  modified_base 14: mod_base = OTHER; note = 2'-fluoro-uridine
  modified_base 15: mod_base = OTHER; note = 2'-O-methyl-cytidine
  modified_base 16: mod_base = OTHER; note = 2'-fluoro-cytidine
  modified_base 17: mod_base = OTHER; note = 2'-O-methyl-uridine
  modified_base 18: mod_base = OTHER; note = 2'-O-methyl-guanosine
  modified_base 19: mod_base = OTHER; note = 2'-O-methyl-uridine
  modified_base 20: mod_base = OTHER; note = 2'-O-methyl-guanosine with phosphorothioate linkage
  modified_base 21: mod_base = OTHER; note = 2'-O-methyl-adenosine with phosphorothioate linkage
  modified_base 22: mod_base = OTHER; note = 2'-O-methyl-uridine
tctgacatgttcttcctgtgat

SEQ ID NO: 707 - RNA, 22 nt, synthetic construct
  source 1..22: mol_type = other RNA
  modified_base 1: mod_base = OTHER; note = 2'-O-methyl-uridine with phosphorothioate linkage
  modified_base 2: mod_base = OTHER; note = 2'-fluoro-cytidine with phosphorothioate linkage
  modified_base 3: mod_base = OTHER; note = 2'-fluoro-uridine
  modified_base 4: mod_base = OTHER; note = 2'-O-methyl-guanosine
  modified_base 5: mod_base = OTHER; note = 2'-fluoro-guanosine
  modified_base 6: mod_base = OTHER; note = 2'-O-methyl-uridine
  modified_base 7: mod_base = OTHER; note = 2'-fluoro-cytidine
  modified_base 8: mod_base = OTHER; note = 2'-O-methyl-adenosine
  modified_base 9: mod_base = OTHER; note = 2'-O-methyl-guanosine
  modified_base 10: mod_base = OTHER; note = 2'-fluoro-guanosine
  modified_base 11: mod_base = OTHER; note = 2'-O-methyl-cytidine
  modified_base 12: mod_base = OTHER; note = 2'-O-methyl-cytidine
  modified_base 13: mod_base = OTHER; note = 2'-O-methyl-adenosine
  modified_base 14: mod_base = OTHER; note = 2'-fluoro-guanosine
  modified_base 15: mod_base = OTHER; note = 2'-O-methyl-cytidine
  modified_base 16: mod_base = OTHER; note = 2'-fluoro-adenosine
  modified_base 17: mod_base = OTHER; note = 2'-O-methyl-uridine
  modified_base 18: mod_base = OTHER; note = 2'-O-methyl-uridine
  modified_base 19: mod_base = OTHER; note = 2'-O-methyl-uridine
  modified_base 20: mod_base = OTHER; note = 2'-O-methyl-guanosine with phosphorothioate linkage
  modified_base 21: mod_base = OTHER; note = 2'-O-methyl-guanosine with phosphorothioate linkage
  modified_base 22: mod_base = OTHER; note = 2'-O-methyl-guanosine
tctggtcaggccagcatttggg

SEQ ID NO: 708 - RNA, 22 nt, synthetic construct
  source 1..22: mol_type = other RNA
  modified_base 1: mod_base = OTHER; note = 2'-O-methyl-uridine with phosphorothioate linkage
  modified_base 2: mod_base = OTHER; note = 2'-fluoro-guanosine with phosphorothioate linkage
  modified_base 3: mod_base = OTHER; note = 2'-fluoro-uridine
  modified_base 4: mod_base = OTHER; note = 2'-O-methyl-uridine
  modified_base 5: mod_base = OTHER; note = 2'-fluoro-uridine
  modified_base 6: mod_base = OTHER; note = 2'-O-methyl-uridine
  modified_base 7: mod_base = OTHER; note = 2'-fluoro-cytidine
  modified_base 8: mod_base = OTHER; note = 2'-O-methyl-adenosine
  modified_base 9: mod_base = OTHER; note = 2'-O-methyl-guanosine
  modified_base 10: mod_base = OTHER; note = 2'-fluoro-uridine
  modified_base 11: mod_base = OTHER; note = 2'-O-methyl-uridine
  modified_base 12: mod_base = OTHER; note = 2'-O-methyl-guanosine
  modified_base 13: mod_base = OTHER; note = 2'-O-methyl-guanosine
  modified_base 14: mod_base = OTHER; note = 2'-fluoro-uridine
  modified_base 15: mod_base = OTHER; note = 2'-O-methyl-guanosine
  modified_base 16: mod_base = OTHER; note = 2'-fluoro-cytidine
  modified_base 17: mod_base = OTHER; note = 2'-O-methyl-uridine
  modified_base 18: mod_base = OTHER; note = 2'-O-methyl-uridine
  modified_base 19: mod_base = OTHER; note = 2'-O-methyl-cytidine
  modified_base 20: mod_base = OTHER; note = 2'-O-methyl-uridine with phosphorothioate linkage
  modified_base 21: mod_base = OTHER; note = 2'-O-methyl-uridine with phosphorothioate linkage
  modified_base 22: mod_base = OTHER; note = 2'-O-methyl-cytidine
tgttttcagttggtgcttcttc

SEQ ID NO: 709 - RNA, 22 nt, synthetic construct
  source 1..22: mol_type = other RNA
  modified_base 1: mod_base = OTHER; note = 2'-O-methyl-uridine with phosphorothioate linkage
  modified_base 2: mod_base = OTHER; note = 2'-fluoro-cytidine with phosphorothioate linkage
  modified_base 3: mod_base = OTHER; note = 2'-fluoro-uridine
  modified_base 4: mod_base = OTHER; note = 2'-O-methyl-cytidine
  modified_base 5: mod_base = OTHER; note = 2'-fluoro-uridine
  modified_base 6: mod_base = OTHER; note = 2'-O-methyl-guanosine
  modified_base 7: mod_base = OTHER; note = 2'-fluoro-adenosine
  modified_base 8: mod_base = OTHER; note = 2'-O-methyl-uridine
  modified_base 9: mod_base = OTHER; note = 2'-O-methyl-guanosine
  modified_base 10: mod_base = OTHER; note = 2'-fluoro-cytidine
  modified_base 11: mod_base = OTHER; note = 2'-O-methyl-cytidine
  modified_base 12: mod_base = OTHER; note = 2'-O-methyl-adenosine
  modified_base 13: mod_base = OTHER; note = 2'-O-methyl-guanosine
  modified_base 14: mod_base = OTHER; note = 2'-fluoro-uridine
  modified_base 15: mod_base = OTHER; note = 2'-O-methyl-guanosine
  modified_base 16: mod_base = OTHER; note = 2'-fluoro-uridine
  modified_base 17: mod_base = OTHER; note = 2'-O-methyl-guanosine
  modified_base 18: mod_base = OTHER; note = 2'-O-methyl-guanosine
  modified_base 19: mod_base = OTHER; note = 2'-O-methyl-uridine
  modified_base 20: mod_base = OTHER; note = 2'-O-methyl-guanosine with phosphorothioate linkage
  modified_base 21: mod_base = OTHER; note = 2'-O-methyl-uridine with phosphorothioate linkage
  modified_base 22: mod_base = OTHER; note = 2'-O-methyl-cytidine
tctctgatgccagtgtggtgtc

SEQ ID NO: 710 - RNA, 22 nt, synthetic construct
  source 1..22: mol_type = other RNA
  modified_base 1: mod_base = OTHER; note = 2'-O-methyl-uridine with phosphorothioate linkage
  modified_base 2: mod_base = OTHER; note = 2'-fluoro-adenosine with phosphorothioate linkage
  modified_base 3: mod_base = OTHER; note = 2'-fluoro-uridine
  modified_base 4: mod_base = OTHER; note = 2'-O-methyl-cytidine
  modified_base 5: mod_base = OTHER; note = 2'-fluoro-adenosine
  modified_base 6: mod_base = OTHER; note = 2'-O-methyl-cytidine
  modified_base 7: mod_base = OTHER; note = 2'-fluoro-cytidine
  modified_base 8: mod_base = OTHER; note = 2'-O-methyl-adenosine
  modified_base 9: mod_base = OTHER; note = 2'-O-methyl-uridine
  modified_base 10: mod_base = OTHER; note = 2'-fluoro-guanosine
  modified_base 11: mod_base = OTHER; note = 2'-O-methyl-guanosine
  modified_base 12: mod_base = OTHER; note = 2'-O-methyl-uridine
  modified_base 13: mod_base = OTHER; note = 2'-O-methyl-adenosine
  modified_base 14: mod_base = OTHER; note = 2'-fluoro-guanosine
  modified_base 15: mod_base = OTHER; note = 2'-O-methyl-cytidine
  modified_base 16: mod_base = OTHER; note = 2'-fluoro-adenosine
  modified_base 17: mod_base = OTHER; note = 2'-O-methyl-adenosine
  modified_base 18: mod_base = OTHER; note = 2'-O-methyl-uridine
  modified_base 19: mod_base = OTHER; note = 2'-O-methyl-cytidine
  modified_base 20: mod_base = OTHER; note = 2'-O-methyl-cytidine with phosphorothioate linkage
  modified_base 21: mod_base = OTHER; note = 2'-O-methyl-uridine with phosphorothioate linkage
  modified_base 22: mod_base = OTHER; note = 2'-O-methyl-guanosine
tatcaccatggtagcaatcctg

SEQ ID NO: 711 - RNA, 22 nt, synthetic construct
  source 1..22: mol_type = other RNA
  modified_base 1: mod_base = OTHER; note = 2'-O-methyl-uridine with phosphorothioate linkage
  modified_base 2: mod_base = OTHER; note = 2'-fluoro-guanosine with phosphorothioate linkage
  modified_base 3: mod_base = OTHER; note = 2'-fluoro-uridine
  modified_base 4: mod_base = OTHER; note = 2'-O-methyl-guanosine
  modified_base 5: mod_base = OTHER; note = 2'-fluoro-guanosine
  modified_base 6: mod_base = OTHER; note = 2'-O-methyl-adenosine
  modified_base 7: mod_base = OTHER; note = 2'-fluoro-guanosine
  modified_base 8: mod_base = OTHER; note = 2'-O-methyl-adenosine
  modified_base 9: mod_base = OTHER; note = 2'-O-methyl-adenosine
  modified_base 10: mod_base = OTHER; note = 2'-fluoro-uridine
  modified_base 11: mod_base = OTHER; note = 2'-O-methyl-guanosine
  modified_base 12: mod_base = OTHER; note = 2'-O-methyl-adenosine
  modified_base 13: mod_base = OTHER; note = 2'-O-methyl-guanosine
  modified_base 14: mod_base = OTHER; note = 2'-fluoro-cytidine
  modified_base 15: mod_base = OTHER; note = 2'-O-methyl-cytidine
  modified_base 16: mod_base = OTHER; note = 2'-fluoro-uridine
  modified_base 17: mod_base = OTHER; note = 2'-O-methyl-cytidine
  modified_base 18: mod_base = OTHER; note = 2'-O-methyl-guanosine
  modified_base 19: mod_base = OTHER; note = 2'-O-methyl-adenosine
  modified_base 20: mod_base = OTHER; note = 2'-O-methyl-uridine with phosphorothioate linkage
  modified_base 21: mod_base = OTHER; note = 2'-O-methyl-adenosine with phosphorothioate linkage
  modified_base 22: mod_base = OTHER; note = 2'-O-methyl-adenosine
tgtggagaatgagcctcgataa

SEQ ID NO: 712 - RNA, 22 nt, synthetic construct
  source 1..22: mol_type = other RNA
  modified_base 1: mod_base = OTHER; note = 2'-O-methyl-uridine with phosphorothioate linkage
  modified_base 2: mod_base = OTHER; note = 2'-fluoro-uridine with phosphorothioate linkage
  modified_base 3: mod_base = OTHER; note = 2'-fluoro-uridine
  modified_base 4: mod_base = OTHER; note = 2'-O-methyl-cytidine
  modified_base 5: mod_base = OTHER; note = 2'-fluoro-uridine
  modified_base 6: mod_base = OTHER; note = 2'-O-methyl-guanosine
  modified_base 7: mod_base = OTHER; note = 2'-fluoro-uridine
  modified_base 8: mod_base = OTHER; note = 2'-O-methyl-uridine
  modified_base 9: mod_base = OTHER; note = 2'-O-methyl-guanosine
  modified_base 10: mod_base = OTHER; note = 2'-fluoro-uridine
  modified_base 11: mod_base = OTHER; note = 2'-O-methyl-cytidine
  modified_base 12: mod_base = OTHER; note = 2'-O-methyl-cytidine
  modified_base 13: mod_base = OTHER; note = 2'-O-methyl-uridine
  modified_base 14: mod_base = OTHER; note = 2'-fluoro-cytidine
  modified_base 15: mod_base = OTHER; note = 2'-O-methyl-uridine
  modified_base 16: mod_base = OTHER; note = 2'-fluoro-guanosine
  modified_base 17: mod_base = OTHER; note = 2'-O-methyl-adenosine
  modified_base 18: mod_base = OTHER; note = 2'-O-methyl-uridine
  modified_base 19: mod_base = OTHER; note = 2'-O-methyl-guanosine
  modified_base 20: mod_base = OTHER; note = 2'-O-methyl-cytidine with phosphorothioate linkage
  modified_base 21: mod_base = OTHER; note = 2'-O-methyl-cytidine with phosphorothioate linkage
  modified_base 22: mod_base = OTHER; note = 2'-O-methyl-adenosine
tttctgttgtcctctgatgcca

SEQ ID NO: 713 - RNA, 22 nt, synthetic construct
  source 1..22: mol_type = other RNA
  modified_base 1: mod_base = OTHER; note = 2'-O-methyl-uridine with phosphorothioate linkage
  modified_base 2: mod_base = OTHER; note = 2'-fluoro-cytidine with phosphorothioate linkage
  modified_base 3: mod_base = OTHER; note = 2'-fluoro-uridine
  modified_base 4: mod_base = OTHER; note = 2'-O-methyl-guanosine
  modified_base 5: mod_base = OTHER; note = 2'-fluoro-uridine
  modified_base 6: mod_base = OTHER; note = 2'-O-methyl-cytidine
  modified_base 7: mod_base = OTHER; note = 2'-fluoro-adenosine
  modified_base 8: mod_base = OTHER; note = 2'-O-methyl-cytidine
  modified_base 9: mod_base = OTHER; note = 2'-O-methyl-uridine
  modified_base 10: mod_base = OTHER; note = 2'-fluoro-guanosine
  modified_base 11: mod_base = OTHER; note = 2'-O-methyl-guanosine
  modified_base 12: mod_base = OTHER; note = 2'-O-methyl-adenosine
  modified_base 13: mod_base = OTHER; note = 2'-O-methyl-cytidine
  modified_base 14: mod_base = OTHER; note = 2'-fluoro-adenosine
  modified_base 15: mod_base = OTHER; note = 2'-O-methyl-uridine
  modified_base 16: mod_base = OTHER; note = 2'-fluoro-uridine
  modified_base 17: mod_base = OTHER; note = 2'-O-methyl-guanosine
  modified_base 18: mod_base = OTHER; note = 2'-O-methyl-uridine
  modified_base 19: mod_base = OTHER; note = 2'-O-methyl-guanosine
  modified_base 20: mod_base = OTHER; note = 2'-O-methyl-uridine with phosphorothioate linkage
  modified_base 21: mod_base = OTHER; note = 2'-O-methyl-cytidine with phosphorothioate linkage
  modified_base 22: mod_base = OTHER; note = 2'-O-methyl-adenosine
tctgtcactggacattgtgtca

SEQ ID NO: 714 - RNA, 22 nt, synthetic construct
  source 1..22: mol_type = other RNA
  modified_base 1: mod_base = OTHER; note = 2'-O-methyl-uridine with phosphorothioate linkage
  modified_base 2: mod_base = OTHER; note = 2'-fluoro-uridine with phosphorothioate linkage
  modified_base 3: mod_base = OTHER; note = 2'-fluoro-guanosine
  modified_base 4: mod_base = OTHER; note = 2'-O-methyl-cytidine
  modified_base 5: mod_base = OTHER; note = 2'-fluoro-uridine
  modified_base 6: mod_base = OTHER; note = 2'-O-methyl-uridine
  modified_base 7: mod_base = OTHER; note = 2'-fluoro-guanosine
  modified_base 8: mod_base = OTHER; note = 2'-O-methyl-uridine
  modified_base 9: mod_base = OTHER; note = 2'-O-methyl-uridine
  modified_base 10: mod_base = OTHER; note = 2'-fluoro-cytidine
  modified_base 11: mod_base = OTHER; note = 2'-O-methyl-adenosine
  modified_base 12: mod_base = OTHER; note = 2'-O-methyl-guanosine
  modified_base 13: mod_base = OTHER; note = 2'-O-methyl-adenosine
  modified_base 14: mod_base = OTHER; note = 2'-fluoro-adenosine
  modified_base 15: mod_base = OTHER; note = 2'-O-methyl-guanosine
  modified_base 16: mod_base = OTHER; note = 2'-fluoro-guanosine
  modified_base 17: mod_base = OTHER; note = 2'-O-methyl-adenosine
  modified_base 18: mod_base = OTHER; note = 2'-O-methyl-guanosine
  modified_base 19: mod_base = OTHER; note = 2'-O-methyl-cytidine
  modified_base 20: mod_base = OTHER; note = 2'-O-methyl-cytidine with phosphorothioate linkage
  modified_base 21: mod_base = OTHER; note = 2'-O-methyl-uridine with phosphorothioate linkage
  modified_base 22: mod_base = OTHER; note = 2'-O-methyl-cytidine
ttgcttgttcagaaggagcctc

SEQ ID NO: 715 - RNA, 22 nt, synthetic construct
  source 1..22: mol_type = other RNA
  modified_base 1: mod_base = OTHER; note = 2'-O-methyl-uridine with phosphorothioate linkage
  modified_base 2: mod_base = OTHER; note = 2'-fluoro-cytidine with phosphorothioate linkage
  modified_base 3: mod_base = OTHER; note = 2'-fluoro-uridine
  modified_base 4: mod_base = OTHER; note = 2'-O-methyl-uridine
  modified_base 5: mod_base = OTHER; note = 2'-fluoro-uridine
  modified_base 6: mod_base = OTHER; note = 2'-O-methyl-guanosine
  modified_base 7: mod_base = OTHER; note = 2'-fluoro-cytidine
  modified_base 8: mod_base = OTHER; note = 2'-O-methyl-uridine
  modified_base 9: mod_base = OTHER; note = 2'-O-methyl-cytidine
  modified_base 10: mod_base = OTHER; note = 2'-fluoro-adenosine
  modified_base 11: mod_base = OTHER; note = 2'-O-methyl-guanosine
  modified_base 12: mod_base = OTHER; note = 2'-O-methyl-uridine
  modified_base 13: mod_base = OTHER; note = 2'-O-methyl-cytidine
  modified_base 14: mod_base = OTHER; note = 2'-fluoro-guanosine
  modified_base 15: mod_base = OTHER; note = 2'-O-methyl-guanosine
  modified_base 16: mod_base = OTHER; note = 2'-fluoro-uridine
  modified_base 17: mod_base = OTHER; note = 2'-O-methyl-guanosine
  modified_base 18: mod_base = OTHER; note = 2'-O-methyl-cytidine
  modified_base 19: mod_base = OTHER; note = 2'-O-methyl-uridine
  modified_base 20: mod_base = OTHER; note = 2'-O-methyl-uridine with phosphorothioate linkage
  modified_base 21: mod_base = OTHER; note = 2'-O-methyl-guanosine with phosphorothioate linkage
  modified_base 22: mod_base = OTHER; note = 2'-O-methyl-uridine
tctttgctcagtcggtgcttgt

SEQ ID NO: 716 - RNA, 22 nt, synthetic construct
  source 1..22: mol_type = other RNA
  modified_base 1: mod_base = OTHER; note = 2'-O-methyl-uridine with phosphorothioate linkage
  modified_base 2: mod_base = OTHER; note = 2'-fluoro-cytidine with phosphorothioate linkage
  modified_base 3: mod_base = OTHER; note = 2'-fluoro-uridine
  modified_base 4: mod_base = OTHER; note = 2'-O-methyl-guanosine
  modified_base 5: mod_base = OTHER; note = 2'-fluoro-uridine
  modified_base 6: mod_base = OTHER; note = 2'-O-methyl-uridine
  modified_base 7: mod_base = OTHER; note = 2'-fluoro-guanosine
  modified_base 8: mod_base = OTHER; note = 2'-O-methyl-uridine
  modified_base 9: mod_base = OTHER; note = 2'-O-methyl-cytidine
  modified_base 10: mod_base = OTHER; note = 2'-fluoro-cytidine
  modified_base 11: mod_base = OTHER; note = 2'-O-methyl-uridine
  modified_base 12: mod_base = OTHER; note = 2'-O-methyl-cytidine
  modified_base 13: mod_base = OTHER; note = 2'-O-methyl-uridine
  modified_base 14: mod_base = OTHER; note = 2'-fluoro-guanosine
  modified_base 15: mod_base = OTHER; note = 2'-O-methyl-adenosine
  modified_base 16: mod_base = OTHER; note = 2'-fluoro-uridine
  modified_base 17: mod_base = OTHER; note = 2'-O-methyl-guanosine
  modified_base 18: mod_base = OTHER; note = 2'-O-methyl-cytidine
  modified_base 19: mod_base = OTHER; note = 2'-O-methyl-cytidine
  modified_base 20: mod_base = OTHER; note = 2'-O-methyl-adenosine with phosphorothioate linkage
  modified_base 21: mod_base = OTHER; note = 2'-O-methyl-guanosine with phosphorothioate linkage
  modified_base 22: mod_base = OTHER; note = 2'-O-methyl-uridine
tctgttgtcctctgatgccagt

SEQ ID NO: 717 - RNA, 22 nt, synthetic construct
  source 1..22: mol_type = other RNA
  modified_base 1: mod_base = OTHER; note = 2'-O-methyl-uridine with phosphorothioate linkage
  modified_base 2: mod_base = OTHER; note = 2'-fluoro-cytidine with phosphorothioate linkage
  modified_base 3: mod_base = OTHER; note = 2'-fluoro-cytidine
  modified_base 4: mod_base = OTHER; note = 2'-O-methyl-adenosine
  modified_base 5: mod_base = OTHER; note = 2'-fluoro-adenosine
  modified_base 6: mod_base = OTHER; note = 2'-O-methyl-guanosine
  modified_base 7: mod_base = OTHER; note = 2'-fluoro-cytidine
  modified_base 8: mod_base = OTHER; note = 2'-O-methyl-uridine
  modified_base 9: mod_base = OTHER; note = 2'-O-methyl-uridine
  modified_base 10: mod_base = OTHER; note = 2'-fluoro-guanosine
  modified_base 11: mod_base = OTHER; note = 2'-O-methyl-guanosine
  modified_base 12: mod_base = OTHER; note = 2'-O-methyl-cytidine
  modified_base 13: mod_base = OTHER; note = 2'-O-methyl-adenosine
  modified_base 14: mod_base = OTHER; note = 2'-fluoro-adenosine
  modified_base 15: mod_base = OTHER; note = 2'-O-methyl-guanosine
  modified_base 16: mod_base = OTHER; note = 2'-fluoro-uridine
  modified_base 17: mod_base = OTHER; note = 2'-O-methyl-uridine
  modified_base 18: mod_base = OTHER; note = 2'-O-methyl-cytidine
  modified_base 19: mod_base = OTHER; note = 2'-O-methyl-uridine
  modified_base 20: mod_base = OTHER; note = 2'-O-methyl-uridine with phosphorothioate linkage
  modified_base 21: mod_base = OTHER; note = 2'-O-methyl-cytidine with phosphorothioate linkage
  modified_base 22: mod_base = OTHER; note = 2'-O-methyl-cytidine
tccaagcttggcaagttcttcc

SEQ ID NO: 718 - RNA, 22 nt, synthetic construct
  source 1..22: mol_type = other RNA
  modified_base 1: mod_base = OTHER; note = 2'-O-methyl-uridine with phosphorothioate linkage
  modified_base 2: mod_base = OTHER; note = 2'-fluoro-adenosine with phosphorothioate linkage
  modified_base 3: mod_base = OTHER; note = 2'-fluoro-uridine
  modified_base 4: mod_base = OTHER; note = 2'-O-methyl-guanosine
  modified_base 5: mod_base = OTHER; note = 2'-fluoro-guanosine
  modified_base 6: mod_base = OTHER; note = 2'-O-methyl-uridine
  modified_base 7: mod_base = OTHER; note = 2'-fluoro-adenosine
  modified_base 8: mod_base = OTHER; note = 2'-O-methyl-guanosine
  modified_base 9: mod_base = OTHER; note = 2'-O-methyl-cytidine
  modified_base 10: mod_base = OTHER; note = 2'-fluoro-adenosine
  modified_base 11: mod_base = OTHER; note = 2'-O-methyl-adenosine
  modified_base 12: mod_base = OTHER; note = 2'-O-methyl-uridine
  modified_base 13: mod_base = OTHER; note = 2'-O-methyl-cytidine
  modified_base 14: mod_base = OTHER; note = 2'-fluoro-cytidine
  modified_base 15: mod_base = OTHER; note = 2'-O-methyl-uridine
  modified_base 16: mod_base = OTHER; note = 2'-fluoro-guanosine
  modified_base 17: mod_base = OTHER; note = 2'-O-methyl-guanosine
  modified_base 18: mod_base = OTHER; note = 2'-O-methyl-adenosine
  modified_base 19: mod_base = OTHER; note = 2'-O-methyl-cytidine
  modified_base 20: mod_base = OTHER; note = 2'-O-methyl-cytidine with phosphorothioate linkage
  modified_base 21: mod_base = OTHER; note = 2'-O-methyl-cytidine with phosphorothioate linkage
  modified_base 22: mod_base = OTHER; note = 2'-O-methyl-cytidine
tatggtagcaatcctggacccc

SEQ ID NO: 719 - RNA, 22 nt, synthetic construct
  source 1..22: mol_type = other RNA
  modified_base 1: mod_base = OTHER; note = 2'-O-methyl-uridine with phosphorothioate linkage
  modified_base 2: mod_base = OTHER; note = 2'-fluoro-guanosine with phosphorothioate linkage
  modified_base 3: mod_base = OTHER; note = 2'-fluoro-uridine
  modified_base 4: mod_base = OTHER; note = 2'-O-methyl-adenosine
  modified_base 5: mod_base = OTHER; note = 2'-fluoro-uridine
  modified_base 6: mod_base = OTHER; note = 2'-O-methyl-adenosine
  modified_base 7: mod_base = OTHER; note = 2'-fluoro-adenosine
  modified_base 8: mod_base = OTHER; note = 2'-O-methyl-cytidine
  modified_base 9: mod_base = OTHER; note = 2'-O-methyl-adenosine
  modified_base 10: mod_base = OTHER; note = 2'-fluoro-cytidine
  modified_base 11: mod_base = OTHER; note = 2'-O-methyl-cytidine
  modified_base 12: mod_base = OTHER; note = 2'-O-methyl-adenosine
  modified_base 13: mod_base = OTHER; note = 2'-O-methyl-adenosine
  modified_base 14: mod_base = OTHER; note = 2'-fluoro-guanosine
  modified_base 15: mod_base = OTHER; note = 2'-O-methyl-guanosine
  modified_base 16: mod_base = OTHER; note = 2'-fluoro-guanosine
  modified_base 17: mod_base = OTHER; note = 2'-O-methyl-cytidine
  modified_base 18: mod_base = OTHER; note = 2'-O-methyl-guanosine
  modified_base 19: mod_base = OTHER; note = 2'-O-methyl-adenosine
  modified_base 20: mod_base = OTHER; note = 2'-O-methyl-adenosine with phosphorothioate linkage
  modified_base 21: mod_base = OTHER; note = 2'-O-methyl-uridine with phosphorothioate linkage
  modified_base 22: mod_base = OTHER; note = 2'-O-methyl-cytidine
tgtataacaccaagggcgaatc

SEQ ID NO: 720 - RNA, 22 nt, synthetic construct
  source 1..22: mol_type = other RNA
  modified_base 1: mod_base = OTHER; note = 2'-O-methyl-uridine with phosphorothioate linkage
  modified_base 2: mod_base = OTHER; note = 2'-fluoro-guanosine with phosphorothioate linkage
  modified_base 3: mod_base = OTHER; note = 2'-fluoro-adenosine
  modified_base 4: mod_base = OTHER; note = 2'-O-methyl-cytidine
  modified_base 5: mod_base = OTHER; note = 2'-fluoro-adenosine
  modified_base 6: mod_base = OTHER; note = 2'-O-methyl-cytidine
  modified_base 7: mod_base = OTHER; note = 2'-fluoro-uridine
  modified_base 8: mod_base = OTHER; note = 2'-O-methyl-guanosine
  modified_base 9: mod_base = OTHER; note = 2'-O-methyl-guanosine
  modified_base 10: mod_base = OTHER; note = 2'-fluoro-guanosine
  modified_base 11: mod_base = OTHER; note = 2'-O-methyl-adenosine
  modified_base 12: mod_base = OTHER; note = 2'-O-methyl-uridine
  modified_base 13: mod_base = OTHER; note = 2'-O-methyl-cytidine
  modified_base 14: mod_base = OTHER; note = 2'-fluoro-cytidine
  modified_base 15: mod_base = OTHER; note = 2'-O-methyl-adenosine
  modified_base 16: mod_base = OTHER; note = 2'-fluoro-uridine
  modified_base 17: mod_base = OTHER; note = 2'-O-methyl-guanosine
  modified_base 18: mod_base = OTHER; note = 2'-O-methyl-guanosine
  modified_base 19: mod_base = OTHER; note = 2'-O-methyl-uridine
  modified_base 20: mod_base = OTHER; note = 2'-O-methyl-adenosine with phosphorothioate linkage
  modified_base 21: mod_base = OTHER; note = 2'-O-methyl-uridine with phosphorothioate linkage
  modified_base 22: mod_base = OTHER; note = 2'-O-methyl-adenosine
tgacactgggatccatggtata

SEQ ID NO: 721 - RNA, 22 nt, synthetic construct
  source 1..22: mol_type = other RNA
  modified_base 1: mod_base = OTHER; note = 2'-O-methyl-uridine with phosphorothioate linkage
  modified_base 2: mod_base = OTHER; note = 2'-fluoro-cytidine with phosphorothioate linkage
  modified_base 3: mod_base = OTHER; note = 2'-fluoro-uridine
  modified_base 4: mod_base = OTHER; note = 2'-O-methyl-uridine
  modified_base 5: mod_base = OTHER; note = 2'-fluoro-cytidine
  modified_base 6: mod_base = OTHER; note = 2'-O-methyl-cytidine
  modified_base 7: mod_base = OTHER; note = 2'-fluoro-uridine
  modified_base 8: mod_base = OTHER; note = 2'-O-methyl-guanosine
  modified_base 9: mod_base = OTHER; note = 2'-O-methyl-uridine
  modified_base 10: mod_base = OTHER; note = 2'-fluoro-guanosine
  modified_base 11: mod_base = OTHER; note = 2'-O-methyl-adenosine
  modified_base 12: mod_base = OTHER; note = 2'-O-methyl-cytidine
  modified_base 13: mod_base = OTHER; note = 2'-O-methyl-adenosine
  modified_base 14: mod_base = OTHER; note = 2'-fluoro-guanosine
  modified_base 15: mod_base = OTHER; note = 2'-O-methyl-uridine
  modified_base 16: mod_base = OTHER; note = 2'-fluoro-guanosine
  modified_base 17: mod_base = OTHER; note = 2'-O-methyl-guanosine
  modified_base 18: mod_base = OTHER; note = 2'-O-methyl-uridine
  modified_base 19: mod_base = OTHER; note = 2'-O-methyl-guanosine
  modified_base 20: mod_base = OTHER; note = 2'-O-methyl-guanosine with phosphorothioate linkage
  modified_base 21: mod_base = OTHER; note = 2'-O-methyl-adenosine with phosphorothioate linkage
  modified_base 22: mod_base = OTHER; note = 2'-O-methyl-guanosine
tcttcctgtgacagtggtggag

SEQ ID NO: 722 - RNA, 22 nt, synthetic construct
  source 1..22: mol_type = other RNA
  modified_base 1: mod_base = OTHER; note = 2'-O-methyl-uridine with phosphorothioate linkage
  modified_base 2: mod_base = OTHER; note = 2'-fluoro-uridine with phosphorothioate linkage
  modified_base 3: mod_base = OTHER; note = 2'-fluoro-cytidine
  modified_base 4: mod_base = OTHER; note = 2'-O-methyl-cytidine
  modified_base 5: mod_base = OTHER; note = 2'-fluoro-cytidine
  modified_base 6: mod_base = OTHER; note = 2'-O-methyl-adenosine
  modified_base 7: mod_base = OTHER; note = 2'-fluoro-cytidine
  modified_base 8: mod_base = OTHER; note = 2'-O-methyl-cytidine
  modified_base 9: mod_base = OTHER; note = 2'-O-methyl-uridine
  modified_base 10: mod_base = OTHER; note = 2'-fluoro-guanosine
  modified_base 11: mod_base = OTHER; note = 2'-O-methyl-adenosine
  modified_base 12: mod_base = OTHER; note = 2'-O-methyl-cytidine
  modified_base 13: mod_base = OTHER; note = 2'-O-methyl-adenosine
  modified_base 14: mod_base = OTHER; note = 2'-fluoro-cytidine
  modified_base 15: mod_base = OTHER; note = 2'-O-methyl-uridine
  modified_base 16: mod_base = OTHER; note = 2'-fluoro-guanosine
  modified_base 17: mod_base = OTHER; note = 2'-O-methyl-guanosine
  modified_base 18: mod_base = OTHER; note = 2'-O-methyl-guanosine
  modified_base 19: mod_base = OTHER; note = 2'-O-methyl-adenosine
  modified_base 20: mod_base = OTHER; note = 2'-O-methyl-uridine with phosphorothioate linkage
  modified_base 21: mod_base = OTHER; note = 2'-O-methyl-cytidine with phosphorothioate linkage
  modified_base 22: mod_base = OTHER; note = 2'-O-methyl-cytidine
ttcccacctgacactgggatcc

SEQ ID NO: 723 - RNA, 22 nt, synthetic construct
  source 1..22: mol_type = other RNA
  modified_base 1: mod_base = OTHER; note = 2'-O-methyl-uridine with phosphorothioate linkage
  modified_base 2: mod_base = OTHER; note = 2'-fluoro-guanosine with phosphorothioate linkage
  modified_base 3: mod_base = OTHER; note = 2'-fluoro-cytidine
  modified_base 4: mod_base = OTHER; note = 2'-O-methyl-adenosine
  modified_base 5: mod_base = OTHER; note = 2'-fluoro-uridine
  modified_base 6: mod_base = OTHER; note = 2'-O-methyl-uridine
  modified_base 7: mod_base = OTHER; note = 2'-fluoro-uridine
  modified_base 8: mod_base = OTHER; note = 2'-O-methyl-guanosine
  modified_base 9: mod_base = OTHER; note = 2'-O-methyl-guanosine
  modified_base 10: mod_base = OTHER; note = 2'-fluoro-guanosine
  modified_base 11: mod_base = OTHER; note = 2'-O-methyl-uridine
  modified_base 12: mod_base = OTHER; note = 2'-O-methyl-adenosine
  modified_base 13: mod_base = OTHER; note = 2'-O-methyl-guanosine
  modified_base 14: mod_base = OTHER; note = 2'-fluoro-uridine
  modified_base 15: mod_base = OTHER; note = 2'-O-methyl-uridine
  modified_base 16: mod_base = OTHER; note = 2'-fluoro-uridine
  modified_base 17: mod_base = OTHER; note = 2'-O-methyl-uridine
  modified_base 18: mod_base = OTHER; note = 2'-O-methyl-cytidine
  modified_base 19: mod_base = OTHER; note = 2'-O-methyl-uridine
  modified_base 20: mod_base = OTHER; note = 2'-O-methyl-guanosine with phosphorothioate linkage
  modified_base 21: mod_base = OTHER; note = 2'-O-methyl-guanosine with phosphorothioate linkage
  modified_base 22: mod_base = OTHER; note = 2'-O-methyl-guanosine
tgcatttgggtagttttctggg

SEQ ID NO: 724 - RNA, 22 nt, synthetic construct
  source 1..22: mol_type = other RNA
  modified_base 1: mod_base = OTHER; note = 2'-O-methyl-uridine with phosphorothioate linkage
  modified_base 2: mod_base = OTHER; note = 2'-fluoro-guanosine with phosphorothioate linkage
  modified_base 3: mod_base = OTHER; note = 2'-fluoro-adenosine
  modified_base 4: mod_base = OTHER; note = 2'-O-methyl-uridine
  modified_base 5: mod_base = OTHER; note = 2'-fluoro-cytidine
  modified_base 6: mod_base = OTHER; note = 2'-O-methyl-adenosine
  modified_base 7: mod_base = OTHER; note = 2'-fluoro-adenosine
  modified_base 8: mod_base = OTHER; note = 2'-O-methyl-guanosine
  modified_base 9: mod_base = OTHER; note = 2'-O-methyl-cytidine
  modified_base 10: mod_base = OTHER; note = 2'-fluoro-cytidine
  modified_base 11: mod_base = OTHER; note = 2'-O-methyl-adenosine
  modified_base 12: mod_base = OTHER; note = 2'-O-methyl-guanosine
  modified_base 13: mod_base = OTHER; note = 2'-O-methyl-cytidine
  modified_base 14: mod_base = OTHER; note = 2'-fluoro-adenosine
  modified_base 15: mod_base = OTHER; note = 2'-O-methyl-uridine
  modified_base 16: mod_base = OTHER; note = 2'-fluoro-uridine
  modified_base 17: mod_base = OTHER; note = 2'-O-methyl-uridine
  modified_base 18: mod_base = OTHER; note = 2'-O-methyl-guanosine
  modified_base 19: mod_base = OTHER; note = 2'-O-methyl-guanosine
  modified_base 20: mod_base = OTHER; note = 2'-O-methyl-guanosine with phosphorothioate linkage
  modified_base 21: mod_base = OTHER; note = 2'-O-methyl-uridine with phosphorothioate linkage
  modified_base 22: mod_base = OTHER; note = 2'-O-methyl-adenosine
tgatcaagccagcatttgggta

SEQ ID NO: 725 - RNA, 22 nt, synthetic construct
  source 1..22: mol_type = other RNA
  modified_base 1: mod_base = OTHER; note = 2'-O-methyl-uridine with phosphorothioate linkage
  modified_base 2: mod_base = OTHER; note = 2'-fluoro-guanosine with phosphorothioate linkage
  modified_base 3: mod_base = OTHER; note = 2'-fluoro-uridine
  modified_base 4: mod_base = OTHER; note = 2'-O-methyl-adenosine
  modified_base 5: mod_base = OTHER; note = 2'-fluoro-guanosine
  modified_base 6: mod_base = OTHER; note = 2'-O-methyl-cytidine
  modified_base 7: mod_base = OTHER; note = 2'-fluoro-adenosine
  modified_base 8: mod_base = OTHER; note = 2'-O-methyl-cytidine
  modified_base 9: mod_base = OTHER; note = 2'-O-methyl-uridine
  modified_base 10: mod_base = OTHER; note = 2'-fluoro-cytidine
  modified_base 11: mod_base = OTHER; note = 2'-O-methyl-cytidine
  modified_base 12: mod_base = OTHER; note = 2'-O-methyl-uridine
  modified_base 13: mod_base = OTHER; note = 2'-O-methyl-guanosine
  modified_base 14: mod_base = OTHER; note = 2'-fluoro-cytidine
  modified_base 15: mod_base = OTHER; note = 2'-O-methyl-adenosine
  modified_base 16: mod_base = OTHER; note = 2'-fluoro-cytidine
  modified_base 17: mod_base = OTHER; note = 2'-O-methyl-cytidine
  modified_base 18: mod_base = OTHER; note = 2'-O-methyl-cytidine
  modified_base 19: mod_base = OTHER; note = 2'-O-methyl-cytidine
  modified_base 20: mod_base = OTHER; note = 2'-O-methyl-adenosine with phosphorothioate linkage
  modified_base 21: mod_base = OTHER; note = 2'-O-methyl-guanosine with phosphorothioate linkage
  modified_base 22: mod_base = OTHER; note = 2'-O-methyl-guanosine
tgtagcactcctgcaccccagg

SEQ ID NO: 726 - RNA, 22 nt, synthetic construct
  source 1..22: mol_type = other RNA
  modified_base 1: mod_base = OTHER; note = 2'-O-methyl-uridine with phosphorothioate linkage
  modified_base 2: mod_base = OTHER; note = 2'-fluoro-uridine with phosphorothioate linkage
  modified_base 3: mod_base = OTHER; note = 2'-fluoro-uridine
  modified_base 4: mod_base = OTHER; note = 2'-O-methyl-guanosine
  modified_base 5: mod_base = OTHER; note = 2'-fluoro-guanosine
  modified_base 6: mod_base = OTHER; note = 2'-O-methyl-guanosine
  modified_base 7: mod_base = OTHER; note = 2'-fluoro-uridine
  modified_base 8: mod_base = OTHER; note = 2'-O-methyl-adenosine
  modified_base 9: mod_base = OTHER; note = 2'-O-methyl-guanosine
  modified_base 10: mod_base = OTHER; note = 2'-fluoro-uridine
  modified_base 11: mod_base = OTHER; note = 2'-O-methyl-uridine
  modified_base 12: mod_base = OTHER; note = 2'-O-methyl-uridine
  modified_base 13: mod_base = OTHER; note = 2'-O-methyl-uridine
  modified_base 14: mod_base = OTHER; note = 2'-fluoro-cytidine
  modified_base 15: mod_base = OTHER; note = 2'-O-methyl-uridine
  modified_base 16: mod_base = OTHER; note = 2'-fluoro-guanosine
  modified_base 17: mod_base = OTHER; note = 2'-O-methyl-guanosine
  modified_base 18: mod_base = OTHER; note = 2'-O-methyl-guanosine
  modified_base 19: mod_base = OTHER; note = 2'-O-methyl-guanosine
  modified_base 20: mod_base = OTHER; note = 2'-O-methyl-uridine with phosphorothioate linkage
  modified_base 21: mod_base = OTHER; note = 2'-O-methyl-cytidine with phosphorothioate linkage
  modified_base 22: mod_base = OTHER; note = 2'-O-methyl-cytidine
tttgggtagttttctggggtcc

SEQ ID NO: 727 - RNA, 22 nt, synthetic construct
  source 1..22: mol_type = other RNA
  modified_base 1: mod_base = OTHER; note = 2'-O-methyl-uridine with phosphorothioate linkage
  modified_base 2: mod_base = OTHER; note = 2'-fluoro-guanosine with phosphorothioate linkage
  modified_base 3: mod_base = OTHER; note = 2'-fluoro-uridine
  modified_base 4: mod_base = OTHER; note = 2'-O-methyl-cytidine
  modified_base 5: mod_base = OTHER; note = 2'-fluoro-uridine
  modified_base 6: mod_base = OTHER; note = 2'-O-methyl-guanosine
  modified_base 7: mod_base = OTHER; note = 2'-fluoro-adenosine
  modified_base 8: mod_base = OTHER; note = 2'-O-methyl-guanosine
  modified_base 9: mod_base = OTHER; note = 2'-O-methyl-cytidine
  modified_base 10: mod_base = OTHER; note = 2'-fluoro-adenosine
  modified_base 11: mod_base = OTHER; note = 2'-O-methyl-uridine
  modified_base 12: mod_base = OTHER; note = 2'-O-methyl-uridine
  modified_base 13: mod_base = OTHER; note = 2'-O-methyl-guanosine
  modified_base 14: mod_base = OTHER; note = 2'-fluoro-uridine
  modified_base 15: mod_base = OTHER; note = 2'-O-methyl-guanosine
  modified_base 16: mod_base = OTHER; note = 2'-fluoro-uridine
  modified_base 17: mod_base = OTHER; note = 2'-O-methyl-cytidine
  modified_base 18: mod_base = OTHER; note = 2'-O-methyl-adenosine
  modified_base 19: mod_base = OTHER; note = 2'-O-methyl-guanosine
  modified_base 20: mod_base = OTHER; note = 2'-O-methyl-guanosine with phosphorothioate linkage
  modified_base 21: mod_base = OTHER; note = 2'-O-methyl-uridine with phosphorothioate linkage
  modified_base 22: mod_base = OTHER; note = 2'-O-methyl-uridine
tgtctgagcattgtgtcaggtt

SEQ ID NO: 728 - RNA, 22 nt, synthetic construct
  source 1..22: mol_type = other RNA
  modified_base 1: mod_base = OTHER; note = 2'-O-methyl-uridine with phosphorothioate linkage
  modified_base 2: mod_base = OTHER; note = 2'-fluoro-guanosine with phosphorothioate linkage
  modified_base 3: mod_base = OTHER; note = 2'-fluoro-adenosine
  modified_base 4: mod_base = OTHER; note = 2'-O-methyl-uridine
  modified_base 5: mod_base = OTHER; note = 2'-fluoro-cytidine
  modified_base 6: mod_base = OTHER; note = 2'-O-methyl-cytidine
  modified_base 7: mod_base = OTHER; note = 2'-fluoro-adenosine
  modified_base 8: mod_base = OTHER; note = 2'-O-methyl-uridine
  modified_base 9: mod_base = OTHER; note = 2'-O-methyl-guanosine
  modified_base 10: mod_base = OTHER; note = 2'-fluoro-guanosine
  modified_base 11: mod_base = OTHER; note = 2'-O-methyl-uridine
  modified_base 12: mod_base = OTHER; note = 2'-O-methyl-adenosine
  modified_base 13: mod_base = OTHER; note = 2'-O-methyl-uridine
  modified_base 14: mod_base = OTHER; note = 2'-fluoro-adenosine
  modified_base 15: mod_base = OTHER; note = 2'-O-methyl-adenosine
  modified_base 16: mod_base = OTHER; note = 2'-fluoro-cytidine
  modified_base 17: mod_base = OTHER; note = 2'-O-methyl-adenosine
  modified_base 18: mod_base = OTHER; note = 2'-O-methyl-cytidine
  modified_base 19: mod_base = OTHER; note = 2'-O-methyl-cytidine
  modified_base 20: mod_base = OTHER; note = 2'-O-methyl-adenosine with phosphorothioate linkage
  modified_base 21: mod_base = OTHER; note = 2'-O-methyl-adenosine with phosphorothioate linkage
  modified_base 22: mod_base = OTHER; note = 2'-O-methyl-guanosine
tgatccatggtataacaccaag

SEQ ID NO: 729 - RNA, 22 nt, synthetic construct
  source 1..22: mol_type = other RNA
  modified_base 1: mod_base = OTHER; note = 2'-O-methyl-uridine with phosphorothioate linkage
  modified_base 2: mod_base = OTHER; note = 2'-fluoro-adenosine with phosphorothioate linkage
  modified_base 3: mod_base = OTHER; note = 2'-fluoro-cytidine
  modified_base 4: mod_base = OTHER; note = 2'-O-methyl-cytidine
  modified_base 5: mod_base = OTHER; note = 2'-fluoro-uridine
  modified_base 6: mod_base = OTHER; note = 2'-O-methyl-guanosine
  modified_base 7: mod_base = OTHER; note = 2'-fluoro-adenosine
  modified_base 8: mod_base = OTHER; note = 2'-O-methyl-cytidine
  modified_base 9: mod_base = OTHER; note = 2'-O-methyl-adenosine
  modified_base 10: mod_base = OTHER; note = 2'-fluoro-cytidine
  modified_base 11: mod_base = OTHER; note = 2'-O-methyl-uridine
  modified_base 12: mod_base = OTHER; note = 2'-O-methyl-guanosine
  modified_base 13: mod_base = OTHER; note = 2'-O-methyl-guanosine
  modified_base 14: mod_base = OTHER; note = 2'-fluoro-guanosine
  modified_base 15: mod_base = OTHER; note = 2'-O-methyl-adenosine
  modified_base 16: mod_base = OTHER; note = 2'-fluoro-uridine
  modified_base 17: mod_base = OTHER; note = 2'-O-methyl-cytidine
  modified_base 18: mod_base = OTHER; note = 2'-O-methyl-cytidine
  modified_base 19: mod_base = OTHER; note = 2'-O-methyl-adenosine
  modified_base 20: mod_base = OTHER; note = 2'-O-methyl-uridine with phosphorothioate linkage
  modified_base 21: mod_base = OTHER; note = 2'-O-methyl-guanosine with phosphorothioate linkage
  modified_base 22: mod_base = OTHER; note = 2'-O-methyl-guanosine
tacctgacactgggatccatgg

SEQ ID NO: 730 - RNA, 22 nt, synthetic construct
  source 1..22: mol_type = other RNA
  modified_base 1: mod_base = OTHER; note = 2'-O-methyl-uridine with phosphorothioate linkage
  modified_base 2: mod_base = OTHER; note = 2'-fluoro-guanosine with phosphorothioate linkage
  modified_base 3: mod_base = OTHER; note = 2'-fluoro-uridine
  modified_base 4: mod_base = OTHER; note = 2'-O-methyl-guanosine
  modified_base 5: mod_base = OTHER; note = 2'-fluoro-cytidine
  modified_base 6: mod_base = OTHER; note = 2'-O-methyl-uridine
  modified_base 7: mod_base = OTHER; note = 2'-fluoro-uridine
  modified_base 8: mod_base = OTHER; note = 2'-O-methyl-cytidine
  modified_base 9: mod_base = OTHER; note = 2'-O-methyl-uridine
  modified_base 10: mod_base = OTHER; note = 2'-fluoro-uridine
  modified_base 11: mod_base = OTHER; note = 2'-O-methyl-cytidine
  modified_base 12: mod_base = OTHER; note = 2'-O-methyl-adenosine
  modified_base 13: mod_base = OTHER; note = 2'-O-methyl-guanosine
  modified_base 14: mod_base = OTHER; note = 2'-fluoro-adenosine
  modified_base 15: mod_base = OTHER; note = 2'-O-methyl-adenosine
  modified_base 16: mod_base = OTHER; note = 2'-fluoro-guanosine
  modified_base 17: mod_base = OTHER; note = 2'-O-methyl-adenosine
  modified_base 18: mod_base = OTHER; note = 2'-O-methyl-adenosine
  modified_base 19: mod_base = OTHER; note = 2'-O-methyl-guanosine
  modified_base 20: mod_base = OTHER; note = 2'-O-methyl-cytidine with phosphorothioate linkage
  modified_base 21: mod_base = OTHER; note = 2'-O-methyl-cytidine with phosphorothioate linkage
  modified_base 22: mod_base = OTHER; note = 2'-O-methyl-uridine
tgtgcttcttcagaagaagcct

SEQ ID NO: 731 - RNA, 22 nt, synthetic construct
  source 1..22: mol_type = other RNA
  modified_base 1: mod_base = OTHER; note = 2'-O-methyl-uridine with phosphorothioate linkage
  modified_base 2: mod_base = OTHER; note = 2'-fluoro-uridine with phosphorothioate linkage
  modified_base 3: mod_base = OTHER; note = 2'-fluoro-uridine
  modified_base 4: mod_base = OTHER; note = 2'-O-methyl-uridine
  modified_base 5: mod_base = OTHER; note = 2'-fluoro-uridine
  modified_base 6: mod_base = OTHER; note = 2'-O-methyl-cytidine
  modified_base 7: mod_base = OTHER; note = 2'-fluoro-uridine
  modified_base 8: mod_base = OTHER; note = 2'-O-methyl-guanosine
  modified_base 9: mod_base = OTHER; note = 2'-O-methyl-guanosine
  modified_base 10: mod_base = OTHER; note = 2'-fluoro-guanosine
  modified_base 11: mod_base = OTHER; note = 2'-O-methyl-guanosine
  modified_base 12: mod_base = OTHER; note = 2'-O-methyl-uridine
  modified_base 13: mod_base = OTHER; note = 2'-O-methyl-cytidine
  modified_base 14: mod_base = OTHER; note = 2'-fluoro-cytidine
  modified_base 15: mod_base = OTHER; note = 2'-O-methyl-guanosine
  modified_base 16: mod_base = OTHER; note = 2'-fluoro-adenosine
  modified_base 17: mod_base = OTHER; note = 2'-O-methyl-cytidine
  modified_base 18: mod_base = OTHER; note = 2'-O-methyl-uridine
  modified_base 19: mod_base = OTHER; note = 2'-O-methyl-adenosine
  modified_base 20: mod_base = OTHER; note = 2'-O-methyl-uridine with phosphorothioate linkage
  modified_base 21: mod_base = OTHER; note = 2'-O-methyl-guanosine with phosphorothioate linkage
  modified_base 22: mod_base = OTHER; note = 2'-O-methyl-cytidine
tttttctggggtccgactatgc

SEQ ID NO: 732 - RNA, 22 nt, synthetic construct
  source 1..22: mol_type = other RNA
  modified_base 1: mod_base = OTHER; note = 2'-O-methyl-uridine with phosphorothioate linkage
  modified_base 2: mod_base = OTHER; note = 2'-fluoro-guanosine with phosphorothioate linkage
  modified_base 3: mod_base = OTHER; note = 2'-fluoro-adenosine
  modified_base 4: mod_base = OTHER; note = 2'-O-methyl-cytidine
  modified_base 5: mod_base = OTHER; note = 2'-fluoro-adenosine
  modified_base 6: mod_base = OTHER; note = 2'-O-methyl-uridine
  modified_base 7: mod_base = OTHER; note = 2'-fluoro-uridine
  modified_base 8: mod_base = OTHER; note = 2'-O-methyl-guanosine
  modified_base 9: mod_base = OTHER; note = 2'-O-methyl-guanosine
  modified_base 10: mod_base = OTHER; note = 2'-fluoro-guanosine
  modified_base 11: mod_base = OTHER; note = 2'-O-methyl-adenosine
  modified_base 12: mod_base = OTHER; note = 2'-O-methyl-uridine
  modified_base 13: mod_base = OTHER; note = 2'-O-methyl-cytidine
  modified_base 14: mod_base = OTHER; note = 2'-fluoro-cytidine
  modified_base 15: mod_base = OTHER; note = 2'-O-methyl-adenosine
  modified_base 16: mod_base = OTHER; note = 2'-fluoro-uridine
  modified_base 17: mod_base = OTHER; note = 2'-O-methyl-guanosine
  modified_base 18: mod_base = OTHER; note = 2'-O-methyl-guanosine
  modified_base 19: mod_base = OTHER; note = 2'-O-methyl-uridine
  modified_base 20: mod_base = OTHER; note = 2'-O-methyl-adenosine with phosphorothioate linkage
  modified_base 21: mod_base = OTHER; note = 2'-O-methyl-uridine with phosphorothioate linkage
  modified_base 22: mod_base = OTHER; note = 2'-O-methyl-adenosine
tgacattgggatccatggtata

SEQ ID NO: 733 - RNA, 22 nt, synthetic construct
  source 1..22: mol_type = other RNA
  modified_base 1: mod_base = OTHER; note = 2'-O-methyl-uridine with phosphorothioate linkage
  modified_base 2: mod_base = OTHER; note = 2'-fluoro-uridine with phosphorothioate linkage
  modified_base 3: mod_base = OTHER; note = 2'-fluoro-adenosine
  modified_base 4: mod_base = OTHER; note = 2'-O-methyl-uridine
  modified_base 5: mod_base = OTHER; note = 2'-fluoro-uridine
  modified_base 6: mod_base = OTHER; note = 2'-O-methyl-cytidine
  modified_base 7: mod_base = OTHER; note = 2'-fluoro-uridine
  modified_base 8: mod_base = OTHER; note = 2'-O-methyl-guanosine
  modified_base 9: mod_base = OTHER; note = 2'-O-methyl-uridine
  modified_base 10: mod_base = OTHER; note = 2'-fluoro-uridine
  modified_base 11: mod_base = OTHER; note = 2'-O-methyl-guanosine
  modified_base 12: mod_base = OTHER; note = 2'-O-methyl-uridine
  modified_base 13: mod_base = OTHER; note = 2'-O-methyl-cytidine
  modified_base 14: mod_base = OTHER; note = 2'-fluoro-cytidine
  modified_base 15: mod_base = OTHER; note = 2'-O-methyl-uridine
  modified_base 16: mod_base = OTHER; note = 2'-fluoro-cytidine
  modified_base 17: mod_base = OTHER; note = 2'-O-methyl-uridine
  modified_base 18: mod_base = OTHER; note = 2'-O-methyl-guanosine
  modified_base 19: mod_base = OTHER; note = 2'-O-methyl-adenosine
  modified_base 20: mod_base = OTHER; note = 2'-O-methyl-uridine with phosphorothioate linkage
  modified_base 21: mod_base = OTHER; note = 2'-O-methyl-guanosine with phosphorothioate linkage
  modified_base 22: mod_base = OTHER; note = 2'-O-methyl-cytidine
ttattctgttgtcctctgatgc

SEQ ID NO: 734 - RNA, 22 nt, synthetic construct
  source 1..22: mol_type = other RNA
  modified_base 1: mod_base = OTHER; note = 2'-O-methyl-uridine with phosphorothioate linkage
  modified_base 2: mod_base = OTHER; note = 2'-fluoro-guanosine with phosphorothioate linkage
  modified_base 3: mod_base = OTHER; note = 2'-fluoro-adenosine
  modified_base 4: mod_base = OTHER; note = 2'-O-methyl-cytidine
  modified_base 5: mod_base = OTHER; note = 2'-fluoro-cytidine
  modified_base 6: mod_base = OTHER; note = 2'-O-methyl-adenosine
  modified_base 7: mod_base = OTHER; note = 2'-fluoro-cytidine
  modified_base 8: mod_base = OTHER; note = 2'-O-methyl-cytidine
  modified_base 9: mod_base = OTHER; note = 2'-O-methyl-guanosine
  modified_base 10: mod_base = OTHER; note = 2'-fluoro-uridine
  modified_base 11: mod_base = OTHER; note = 2'-O-methyl-guanosine
  modified_base 12: mod_base = OTHER; note = 2'-O-methyl-guanosine
  modified_base 13: mod_base = OTHER; note = 2'-O-methyl-guanosine
  modified_base 14: mod_base = OTHER; note = 2'-fluoro-adenosine
  modified_base 15: mod_base = OTHER; note = 2'-O-methyl-guanosine
  modified_base 16: mod_base = OTHER; note = 2'-fluoro-uridine
  modified_base 17: mod_base = OTHER; note = 2'-O-methyl-uridine
  modified_base 18: mod_base = OTHER; note = 2'-O-methyl-guanosine
  modified_base 19: mod_base = OTHER; note = 2'-O-methyl-uridine
  modified_base 20: mod_base = OTHER; note = 2'-O-methyl-guanosine with phosphorothioate linkage
  modified_base 21: mod_base = OTHER; note = 2'-O-methyl-adenosine with phosphorothioate linkage
  modified_base 22: mod_base = OTHER; note = 2'-O-methyl-guanosine
tgaccaccgtgggagttgtgag

SEQ ID NO: 735 - RNA, 22 nt, synthetic construct
  source 1..22: mol_type = other RNA
  modified_base 1: mod_base = OTHER; note = 2'-O-methyl-uridine with phosphorothioate linkage
  modified_base 2: mod_base = OTHER; note = 2'-fluoro-cytidine with phosphorothioate linkage
  modified_base 3: mod_base = OTHER; note = 2'-fluoro-uridine
  modified_base 4: mod_base = OTHER; note = 2'-O-methyl-uridine
  modified_base 5: mod_base = OTHER; note = 2'-fluoro-guanosine
  modified_base 6: mod_base = OTHER; note = 2'-O-methyl-uridine
  modified_base 7: mod_base = OTHER; note = 2'-fluoro-uridine
  modified_base 8: mod_base = OTHER; note = 2'-O-methyl-cytidine
  modified_base 9: mod_base = OTHER; note = 2'-O-methyl-guanosine
  modified_base 10: mod_base = OTHER; note = 2'-fluoro-guanosine
  modified_base 11: mod_base = OTHER; note = 2'-O-methyl-adenosine
  modified_base 12: mod_base = OTHER; note = 2'-O-methyl-adenosine
  modified_base 13: mod_base = OTHER; note = 2'-O-methyl-guanosine
  modified_base 14: mod_base = OTHER; note = 2'-fluoro-guanosine
  modified_base 15: mod_base = OTHER; note = 2'-O-methyl-adenosine
  modified_base 16: mod_base = OTHER; note = 2'-fluoro-guanosine
  modified_base 17: mod_base = OTHER; note = 2'-O-methyl-cytidine
  modified_base 18: mod_base = OTHER; note = 2'-O-methyl-cytidine
  modified_base 19: mod_base = OTHER; note = 2'-O-methyl-uridine
  modified_base 20: mod_base = OTHER; note = 2'-O-methyl-cytidine with phosphorothioate linkage
  modified_base 21: mod_base = OTHER; note = 2'-O-methyl-uridine with phosphorothioate linkage
  modified_base 22: mod_base = OTHER; note = 2'-O-methyl-adenosine
tcttgttcggaaggagcctcta

SEQ ID NO: 736 - RNA, 22 nt, synthetic construct
  source 1..22: mol_type = other RNA
  modified_base 1: mod_base = OTHER; note = 2'-O-methyl-uridine with phosphorothioate linkage
  modified_base 2: mod_base = OTHER; note = 2'-fluoro-guanosine with phosphorothioate linkage
  modified_base 3: mod_base = OTHER; note = 2'-fluoro-guanosine
  modified_base 4: mod_base = OTHER; note = 2'-O-methyl-adenosine
  modified_base 5: mod_base = OTHER; note = 2'-fluoro-cytidine
  modified_base 6: mod_base = OTHER; note = 2'-O-methyl-adenosine
  modified_base 7: mod_base = OTHER; note = 2'-fluoro-uridine
  modified_base 8: mod_base = OTHER; note = 2'-O-methyl-uridine
  modified_base 9: mod_base = OTHER; note = 2'-O-methyl-guanosine
  modified_base 10: mod_base = OTHER; note = 2'-fluoro-uridine
  modified_base 11: mod_base = OTHER; note = 2'-O-methyl-guanosine
  modified_base 12: mod_base = OTHER; note = 2'-O-methyl-uridine
  modified_base 13: mod_base = OTHER; note = 2'-O-methyl-cytidine
  modified_base 14: mod_base = OTHER; note = 2'-fluoro-adenosine
  modified_base 15: mod_base = OTHER; note = 2'-O-methyl-guanosine
  modified_base 16: mod_base = OTHER; note = 2'-fluoro-guanosine
  modified_base 17: mod_base = OTHER; note = 2'-O-methyl-uridine
  modified_base 18: mod_base = OTHER; note = 2'-O-methyl-uridine
  modified_base 19: mod_base = OTHER; note = 2'-O-methyl-guanosine
  modified_base 20: mod_base = OTHER; note = 2'-O-methyl-cytidine with phosphorothioate linkage
  modified_base 21: mod_base = OTHER; note = 2'-O-methyl-adenosine with phosphorothioate linkage
  modified_base 22: mod_base = OTHER; note = 2'-O-methyl-guanosine
tggacattgtgtcaggttgcag

SEQ ID NO: 737 - RNA, 22 nt, synthetic construct
  source 1..22: mol_type = other RNA
  modified_base 1: mod_base = OTHER; note = 2'-O-methyl-uridine with phosphorothioate linkage
  modified_base 2: mod_base = OTHER; note = 2'-fluoro-adenosine with phosphorothioate linkage
  modified_base 3: mod_base = OTHER; note = 2'-fluoro-uridine
  modified_base 4: mod_base = OTHER; note = 2'-O-methyl-adenosine
  modified_base 5: mod_base = OTHER; note = 2'-fluoro-adenosine
  modified_base 6: mod_base = OTHER; note = 2'-O-methyl-guanosine
  modified_base 7: mod_base = OTHER; note = 2'-fluoro-guanosine
  modified_base 8: mod_base = OTHER; note = 2'-O-methyl-guanosine
  modified_base 9: mod_base = OTHER; note = 2'-O-methyl-guanosine
  modified_base 10: mod_base = OTHER; note = 2'-fluoro-cytidine
  modified_base 11: mod_base = OTHER; note = 2'-O-methyl-uridine
  modified_base 12: mod_base = OTHER; note = 2'-O-methyl-guanosine
  modified_base 13: mod_base = OTHER; note = 2'-O-methyl-cytidine
  modified_base 14: mod_base = OTHER; note = 2'-fluoro-cytidine
  modified_base 15: mod_base = OTHER; note = 2'-O-methyl-adenosine
  modified_base 16: mod_base = OTHER; note = 2'-fluoro-cytidine
  modified_base 17: mod_base = OTHER; note = 2'-O-methyl-adenosine
  modified_base 18: mod_base = OTHER; note = 2'-O-methyl-guanosine
  modified_base 19: mod_base = OTHER; note = 2'-O-methyl-guanosine
  modified_base 20: mod_base = OTHER; note = 2'-O-methyl-adenosine with phosphorothioate linkage
  modified_base 21: mod_base = OTHER; note = 2'-O-methyl-uridine with phosphorothioate linkage
  modified_base 22: mod_base = OTHER; note = 2'-O-methyl-cytidine
tataaggggctgccacaggatc

SEQ ID NO: 738 - RNA, 22 nt, synthetic construct
  source 1..22: mol_type = other RNA
  modified_base 1: mod_base = OTHER; note = 2'-O-methyl-uridine with phosphorothioate linkage
  modified_base 2: mod_base = OTHER; note = 2'-fluoro-guanosine with phosphorothioate linkage
  modified_base 3: mod_base = OTHER; note = 2'-fluoro-cytidine
  modified_base 4: mod_base = OTHER; note = 2'-O-methyl-uridine
  modified_base 5: mod_base = OTHER; note = 2'-fluoro-uridine
  modified_base 6: mod_base = OTHER; note = 2'-O-methyl-guanosine
  modified_base 7: mod_base = OTHER; note = 2'-fluoro-guanosine
  modified_base 8: mod_base = OTHER; note = 2'-O-methyl-cytidine
  modified_base 9: mod_base = OTHER; note = 2'-O-methyl-adenosine
  modified_base 10: mod_base = OTHER; note = 2'-fluoro-guanosine
  modified_base 11: mod_base = OTHER; note = 2'-O-methyl-guanosine
  modified_base 12: mod_base = OTHER; note = 2'-O-methyl-uridine
  modified_base 13: mod_base = OTHER; note = 2'-O-methyl-cytidine
  modified_base 14: mod_base = OTHER; note = 2'-fluoro-cytidine
  modified_base 15: mod_base = OTHER; note = 2'-O-methyl-uridine
  modified_base 16: mod_base = OTHER; note = 2'-fluoro-uridine
  modified_base 17: mod_base = OTHER; note = 2'-O-methyl-cytidine
  modified_base 18: mod_base = OTHER; note = 2'-O-methyl-cytidine
  modified_base 19: mod_base = OTHER; note = 2'-O-methyl-uridine
  modified_base 20: mod_base = OTHER; note = 2'-O-methyl-guanosine with phosphorothioate linkage
  modified_base 21: mod_base = OTHER; note = 2'-O-methyl-uridine with phosphorothioate linkage
  modified_base 22: mod_base = OTHER; note = 2'-O-methyl-guanosine
tgcttggcaggtccttcctgtg

SEQ ID NO: 739 - RNA, 22 nt, synthetic construct
  source 1..22: mol_type = other RNA
  modified_base 1: mod_base = OTHER; note = 2'-O-methyl-uridine with phosphorothioate linkage
  modified_base 2: mod_base = OTHER; note = 2'-fluoro-cytidine with phosphorothioate linkage
  modified_base 3: mod_base = OTHER; note = 2'-fluoro-uridine
  modified_base 4: mod_base = OTHER; note = 2'-O-methyl-guanosine
  modified_base 5: mod_base = OTHER; note = 2'-fluoro-cytidine
  modified_base 6: mod_base = OTHER; note = 2'-O-methyl-cytidine
  modified_base 7: mod_base = OTHER; note = 2'-fluoro-adenosine
  modified_base 8: mod_base = OTHER; note = 2'-O-methyl-cytidine
  modified_base 9: mod_base = OTHER; note = 2'-O-methyl-adenosine
  modified_base 10: mod_base = OTHER; note = 2'-fluoro-guanosine
  modified_base 11: mod_base = OTHER; note = 2'-O-methyl-guanosine
  modified_base 12: mod_base = OTHER; note = 2'-O-methyl-adenosine
  modified_base 13: mod_base = OTHER; note = 2'-O-methyl-uridine
  modified_base 14: mod_base = OTHER; note = 2'-fluoro-cytidine
  modified_base 15: mod_base = OTHER; note = 2'-O-methyl-uridine
  modified_base 16: mod_base = OTHER; note = 2'-fluoro-guanosine
  modified_base 17: mod_base = OTHER; note = 2'-O-methyl-guanosine
  modified_base 18: mod_base = OTHER; note = 2'-O-methyl-adenosine
  modified_base 19: mod_base = OTHER; note = 2'-O-methyl-uridine
  modified_base 20: mod_base = OTHER; note = 2'-O-methyl-uridine with phosphorothioate linkage
  modified_base 21: mod_base = OTHER; note = 2'-O-methyl-cytidine with phosphorothioate linkage
  modified_base 22: mod_base = OTHER; note = 2'-O-methyl-cytidine
tctgccacaggatctggattcc

SEQ ID NO: 740 - RNA, 22 nt, synthetic construct
  source 1..22: mol_type = other RNA
  modified_base 1: mod_base = OTHER; note = 2'-O-methyl-uridine with phosphorothioate linkage
  modified_base 2: mod_base = OTHER; note = 2'-fluoro-uridine with phosphorothioate linkage
  modified_base 3: mod_base = OTHER; note = 2'-fluoro-cytidine
  modified_base 4: mod_base = OTHER; note = 2'-O-methyl-adenosine
  modified_base 5: mod_base = OTHER; note = 2'-fluoro-adenosine
  modified_base 6: mod_base = OTHER; note = 2'-O-methyl-guanosine
  modified_base 7: mod_base = OTHER; note = 2'-fluoro-cytidine
  modified_base 8: mod_base = OTHER; note = 2'-O-methyl-cytidine
  modified_base 9: mod_base = OTHER; note = 2'-O-methyl-adenosine
  modified_base 10: mod_base = OTHER; note = 2'-fluoro-guanosine
  modified_base 11: mod_base = OTHER; note = 2'-O-methyl-cytidine
  modified_base 12: mod_base = OTHER; note = 2'-O-methyl-adenosine
  modified_base 13: mod_base = OTHER; note = 2'-O-methyl-uridine
  modified_base 14: mod_base = OTHER; note = 2'-fluoro-uridine
  modified_base 15: mod_base = OTHER; note = 2'-O-methyl-uridine
  modified_base 16: mod_base = OTHER; note = 2'-fluoro-guanosine
  modified_base 17: mod_base = OTHER; note = 2'-O-methyl-guanosine
  modified_base 18: mod_base = OTHER; note = 2'-O-methyl-guanosine
  modified_base 19: mod_base = OTHER; note = 2'-O-methyl-uridine
  modified_base 20: mod_base = OTHER; note = 2'-O-methyl-adenosine with phosphorothioate linkage
  modified_base 21: mod_base = OTHER; note = 2'-O-methyl-guanosine with phosphorothioate linkage
  modified_base 22: mod_base = OTHER; note = 2'-O-methyl-uridine
ttcaagccagcatttgggtagt

SEQ ID NO: 741 - RNA, 22 nt, synthetic construct
  source 1..22: mol_type = other RNA
  modified_base 1: mod_base = OTHER; note = 2'-O-methyl-uridine with phosphorothioate linkage
  modified_base 2: mod_base = OTHER; note = 2'-fluoro-uridine with phosphorothioate linkage
  modified_base 3: mod_base = OTHER; note = 2'-fluoro-guanosine
  modified_base 4: mod_base = OTHER; note = 2'-O-methyl-cytidine
  modified_base 5: mod_base = OTHER; note = 2'-fluoro-cytidine
  modified_base 6: mod_base = OTHER; note = 2'-O-methyl-uridine
  modified_base 7: mod_base = OTHER; note = 2'-fluoro-uridine
  modified_base 8: mod_base = OTHER; note = 2'-O-methyl-guanosine
  modified_base 9: mod_base = OTHER; note = 2'-O-methyl-adenosine
  modified_base 10: mod_base = OTHER; note = 2'-fluoro-uridine
  modified_base 11: mod_base = OTHER; note = 2'-O-methyl-adenosine
  modified_base 12: mod_base = OTHER; note = 2'-O-methyl-adenosine
  modified_base 13: mod_base = OTHER; note = 2'-O-methyl-cytidine
  modified_base 14: mod_base = OTHER; note = 2'-fluoro-uridine
  modified_base 15: mod_base = OTHER; note = 2'-O-methyl-cytidine
  modified_base 16: mod_base = OTHER; note = 2'-fluoro-uridine
  modified_base 17: mod_base = OTHER; note = 2'-O-methyl-guanosine
  modified_base 18: mod_base = OTHER; note = 2'-O-methyl-uridine
  modified_base 19: mod_base = OTHER; note = 2'-O-methyl-cytidine
  modified_base 20: mod_base = OTHER; note = 2'-O-methyl-cytidine with phosphorothioate linkage
  modified_base 21: mod_base = OTHER; note = 2'-O-methyl-adenosine with phosphorothioate linkage
  modified_base 22: mod_base = OTHER; note = 2'-O-methyl-uridine
ttgccttgataactctgtccat

SEQ ID NO: 742 - RNA, 22 nt, synthetic construct
  source 1..22: mol_type = other RNA
  modified_base 1: mod_base = OTHER; note = 2'-O-methyl-uridine with phosphorothioate linkage
  modified_base 2: mod_base = OTHER; note = 2'-fluoro-cytidine with phosphorothioate linkage
  modified_base 3: mod_base = OTHER; note = 2'-fluoro-cytidine
  modified_base 4: mod_base = OTHER; note = 2'-O-methyl-cytidine
  modified_base 5: mod_base = OTHER; note = 2'-fluoro-cytidine
  modified_base 6: mod_base = OTHER; note = 2'-O-methyl-adenosine
  modified_base 7: mod_base = OTHER; note = 2'-fluoro-guanosine
  modified_base 8: mod_base = OTHER; note = 2'-O-methyl-guanosine
  modified_base 9: mod_base = OTHER; note = 2'-O-methyl-cytidine
  modified_base 10: mod_base = OTHER; note = 2'-fluoro-cytidine
  modified_base 11: mod_base = OTHER; note = 2'-O-methyl-uridine
  modified_base 12: mod_base = OTHER; note = 2'-O-methyl-uridine
  modified_base 13: mod_base = OTHER; note = 2'-O-methyl-uridine
  modified_base 14: mod_base = OTHER; note = 2'-fluoro-guanosine
  modified_base 15: mod_base = OTHER; note = 2'-O-methyl-cytidine
  modified_base 16: mod_base = OTHER; note = 2'-fluoro-uridine
  modified_base 17: mod_base = OTHER; note = 2'-O-methyl-cytidine
  modified_base 18: mod_base = OTHER; note = 2'-O-methyl-adenosine
  modified_base 19: mod_base = OTHER; note = 2'-O-methyl-guanosine
  modified_base 20: mod_base = OTHER; note = 2'-O-methyl-uridine with phosphorothioate linkage
  modified_base 21: mod_base = OTHER; note = 2'-O-methyl-cytidine with phosphorothioate linkage
  modified_base 22: mod_base = OTHER; note = 2'-O-methyl-guanosine
tccccaggcctttgctcagtcg

SEQ ID NO: 743 - RNA, 22 nt, synthetic construct
  source 1..22: mol_type = other RNA
  modified_base 1: mod_base = OTHER; note = 2'-O-methyl-uridine with phosphorothioate linkage
  modified_base 2: mod_base = OTHER; note = 2'-fluoro-cytidine with phosphorothioate linkage
  modified_base 3: mod_base = OTHER; note = 2'-fluoro-guanosine
  modified_base 4: mod_base = OTHER; note = 2'-O-methyl-adenosine
  modified_base 5: mod_base = OTHER; note = 2'-fluoro-cytidine
  modified_base 6: mod_base = OTHER; note = 2'-O-methyl-uridine
  modified_base 7: mod_base = OTHER; note = 2'-fluoro-adenosine
  modified_base 8: mod_base = OTHER; note = 2'-O-methyl-uridine
  modified_base 9: mod_base = OTHER; note = 2'-O-methyl-guanosine
  modified_base 10: mod_base = OTHER; note = 2'-fluoro-cytidine
  modified_base 11: mod_base = OTHER; note = 2'-O-methyl-uridine
  modified_base 12: mod_base = OTHER; note = 2'-O-methyl-guanosine
  modified_base 13: mod_base = OTHER; note = 2'-O-methyl-guanosine
  modified_base 14: mod_base = OTHER; note = 2'-fluoro-uridine
  modified_base 15: mod_base = OTHER; note = 2'-O-methyl-guanosine
  modified_base 16: mod_base = OTHER; note = 2'-fluoro-uridine
  modified_base 17: mod_base = OTHER; note = 2'-O-methyl-guanosine
  modified_base 18: mod_base = OTHER; note = 2'-O-methyl-guanosine
  modified_base 19: mod_base = OTHER; note = 2'-O-methyl-uridine
  modified_base 20: mod_base = OTHER; note = 2'-O-methyl-guanosine with phosphorothioate linkage
  modified_base 21: mod_base = OTHER; note = 2'-O-methyl-uridine with phosphorothioate linkage
  modified_base 22: mod_base = OTHER; note = 2'-O-methyl-cytidine
tcgactatgctggtgtggtgtc

SEQ ID NO: 744 - RNA, 22 nt, synthetic construct
  source 1..22: mol_type = other RNA
  modified_base 1: mod_base = OTHER; note = 2'-O-methyl-uridine with phosphorothioate linkage
  modified_base 2: mod_base = OTHER; note = 2'-fluoro-guanosine with phosphorothioate linkage
  modified_base 3: mod_base = OTHER; note = 2'-fluoro-guanosine
  modified_base 4: mod_base = OTHER; note = 2'-O-methyl-guanosine
  modified_base 5: mod_base = OTHER; note = 2'-fluoro-cytidine
  modified_base 6: mod_base = OTHER; note = 2'-O-methyl-guanosine
  modified_base 7: mod_base = OTHER; note = 2'-fluoro-adenosine
  modified_base 8: mod_base = OTHER; note = 2'-O-methyl-adenosine
  modified_base 9: mod_base = OTHER; note = 2'-O-methyl-uridine
  modified_base 10: mod_base = OTHER; note = 2'-fluoro-cytidine
  modified_base 11: mod_base = OTHER; note = 2'-O-methyl-uridine
  modified_base 12: mod_base = OTHER; note = 2'-O-methyl-cytidine
  modified_base 13: mod_base = OTHER; note = 2'-O-methyl-adenosine
  modified_base 14: mod_base = OTHER; note = 2'-fluoro-guanosine
  modified_base 15: mod_base = OTHER; note = 2'-O-methyl-cytidine
  modified_base 16: mod_base = OTHER; note = 2'-fluoro-adenosine
  modified_base 17: mod_base = OTHER; note = 2'-O-methyl-uridine
  modified_base 18: mod_base = OTHER; note = 2'-O-methyl-cytidine
  modified_base 19: mod_base = OTHER; note = 2'-O-methyl-uridine
  modified_base 20: mod_base = OTHER; note = 2'-O-methyl-guanosine with phosphorothioate linkage
  modified_base 21: mod_base = OTHER; note = 2'-O-methyl-guanosine with phosphorothioate linkage
  modified_base 22: mod_base = OTHER; note = 2'-O-methyl-adenosine
tgggcgaatctcagcatctgga

SEQ ID NO: 745 - RNA, 22 nt, synthetic construct
  source 1..22: mol_type = other RNA
  modified_base 1: mod_base = OTHER; note = 2'-O-methyl-uridine with phosphorothioate linkage
  modified_base 2: mod_base = OTHER; note = 2'-fluoro-guanosine with phosphorothioate linkage
  modified_base 3: mod_base = OTHER; note = 2'-fluoro-cytidine
  modified_base 4: mod_base = OTHER; note = 2'-O-methyl-cytidine
  modified_base 5: mod_base = OTHER; note = 2'-fluoro-uridine
  modified_base 6: mod_base = OTHER; note = 2'-O-methyl-uridine
  modified_base 7: mod_base = OTHER; note = 2'-fluoro-uridine
  modified_base 8: mod_base = OTHER; note = 2'-O-methyl-guanosine
  modified_base 9: mod_base = OTHER; note = 2'-O-methyl-cytidine
  modified_base 10: mod_base = OTHER; note = 2'-fluoro-uridine
  modified_base 11: mod_base = OTHER; note = 2'-O-methyl-cytidine
  modified_base 12: mod_base = OTHER; note = 2'-O-methyl-adenosine
  modified_base 13: mod_base = OTHER; note = 2'-O-methyl-guanosine
  modified_base 14: mod_base = OTHER; note = 2'-fluoro-uridine
  modified_base 15: mod_base = OTHER; note = 2'-O-methyl-uridine
  modified_base 16: mod_base = OTHER; note = 2'-fluoro-guanosine
  modified_base 17: mod_base = OTHER; note = 2'-O-methyl-guanosine
  modified_base 18: mod_base = OTHER; note = 2'-O-methyl-uridine
  modified_base 19: mod_base = OTHER; note = 2'-O-methyl-guanosine
  modified_base 20: mod_base = OTHER; note = 2'-O-methyl-cytidine with phosphorothioate linkage
  modified_base 21: mod_base = OTHER; note = 2'-O-methyl-uridine with phosphorothioate linkage
  modified_base 22: mod_base = OTHER; note = 2'-O-methyl-uridine
tgcctttgctcagttggtgctt

SEQ ID NO: 746 - RNA, 22 nt, synthetic construct
  source 1..22: mol_type = other RNA
  modified_base 1: mod_base = OTHER; note = 2'-O-methyl-uridine with phosphorothioate linkage
  modified_base 2: mod_base = OTHER; note = 2'-fluoro-uridine with phosphorothioate linkage
  modified_base 3: mod_base = OTHER; note = 2'-fluoro-adenosine
  modified_base 4: mod_base = OTHER; note = 2'-O-methyl-uridine
  modified_base 5: mod_base = OTHER; note = 2'-fluoro-guanosine
  modified_base 6: mod_base = OTHER; note = 2'-O-methyl-cytidine
  modified_base 7: mod_base = OTHER; note = 2'-fluoro-uridine
  modified_base 8: mod_base = OTHER; note = 2'-O-methyl-guanosine
  modified_base 9: mod_base = OTHER; note = 2'-O-methyl-guanosine
  modified_base 10: mod_base = OTHER; note = 2'-fluoro-uridine
  modified_base 11: mod_base = OTHER; note = 2'-O-methyl-guanosine
  modified_base 12: mod_base = OTHER; note = 2'-O-methyl-uridine
  modified_base 13: mod_base = OTHER; note = 2'-O-methyl-guanosine
  modified_base 14: mod_base = OTHER; note = 2'-fluoro-guanosine
  modified_base 15: mod_base = OTHER; note = 2'-O-methyl-uridine
  modified_base 16: mod_base = OTHER; note = 2'-fluoro-guanosine
  modified_base 17: mod_base = OTHER; note = 2'-O-methyl-uridine
  modified_base 18: mod_base = OTHER; note = 2'-O-methyl-cytidine
  modified_base 19: mod_base = OTHER; note = 2'-O-methyl-adenosine
  modified_base 20: mod_base = OTHER; note = 2'-O-methyl-uridine with phosphorothioate linkage
  modified_base 21: mod_base = OTHER; note = 2'-O-methyl-adenosine with phosphorothioate linkage
  modified_base 22: mod_base = OTHER; note = 2'-O-methyl-guanosine
ttatgctggtgtggtgtcatag

SEQ ID NO: 747 - RNA, 22 nt, synthetic construct
  source 1..22: mol_type = other RNA
  modified_base 1: mod_base = OTHER; note = 2'-O-methyl-uridine with phosphorothioate linkage
  modified_base 2: mod_base = OTHER; note = 2'-fluoro-uridine with phosphorothioate linkage
  modified_base 3: mod_base = OTHER; note = 2'-fluoro-uridine
  modified_base 4: mod_base = OTHER; note = 2'-O-methyl-uridine
  modified_base 5: mod_base = OTHER; note = 2'-fluoro-uridine
  modified_base 6: mod_base = OTHER; note = 2'-O-methyl-cytidine
  modified_base 7: mod_base = OTHER; note = 2'-fluoro-adenosine
  modified_base 8: mod_base = OTHER; note = 2'-O-methyl-guanosine
  modified_base 9: mod_base = OTHER; note = 2'-O-methyl-uridine
  modified_base 10: mod_base = OTHER; note = 2'-fluoro-uridine
  modified_base 11: mod_base = OTHER; note = 2'-O-methyl-guanosine
  modified_base 12: mod_base = OTHER; note = 2'-O-methyl-guanosine
  modified_base 13: mod_base = OTHER; note = 2'-O-methyl-uridine
  modified_base 14: mod_base = OTHER; note = 2'-fluoro-guanosine
  modified_base 15: mod_base = OTHER; note = 2'-O-methyl-cytidine
  modified_base 16: mod_base = OTHER; note = 2'-fluoro-uridine
  modified_base 17: mod_base = OTHER; note = 2'-O-methyl-uridine
  modified_base 18: mod_base = OTHER; note = 2'-O-methyl-cytidine
  modified_base 19: mod_base = OTHER; note = 2'-O-methyl-uridine
  modified_base 20: mod_base = OTHER; note = 2'-O-methyl-uridine with phosphorothioate linkage
  modified_base 21: mod_base = OTHER; note = 2'-O-methyl-cytidine with phosphorothioate linkage
  modified_base 22: mod_base = OTHER; note = 2'-O-methyl-adenosine
tttttcagttggtgcttcttca

SEQ ID NO: 748 - RNA, 22 nt, synthetic construct
  source 1..22: mol_type = other RNA
  modified_base 1: mod_base = OTHER; note = 2'-O-methyl-uridine with phosphorothioate linkage
  modified_base 2: mod_base = OTHER; note = 2'-fluoro-guanosine with phosphorothioate linkage
  modified_base 3: mod_base = OTHER; note = 2'-fluoro-adenosine
  modified_base 4: mod_base = OTHER; note = 2'-O-methyl-guanosine
  modified_base 5: mod_base = OTHER; note = 2'-fluoro-cytidine
  modified_base 6: mod_base = OTHER; note = 2'-O-methyl-cytidine
  modified_base 7: mod_base = OTHER; note = 2'-fluoro-uridine
  modified_base 8: mod_base = OTHER; note = 2'-O-methyl-cytidine
  modified_base 9: mod_base = OTHER; note = 2'-O-methyl-uridine
  modified_base 10: mod_base = OTHER; note = 2'-fluoro-adenosine
  modified_base 11: mod_base = OTHER; note = 2'-O-methyl-guanosine
  modified_base 12: mod_base = OTHER; note = 2'-O-methyl-guanosine
  modified_base 13: mod_base = OTHER; note = 2'-O-methyl-cytidine
  modified_base 14: mod_base = OTHER; note = 2'-fluoro-uridine
  modified_base 15: mod_base = OTHER; note = 2'-O-methyl-uridine
  modified_base 16: mod_base = OTHER; note = 2'-fluoro-guanosine
  modified_base 17: mod_base = OTHER; note = 2'-O-methyl-guanosine
  modified_base 18: mod_base = OTHER; note = 2'-O-methyl-adenosine
  modified_base 19: mod_base = OTHER; note = 2'-O-methyl-adenosine
  modified_base 20: mod_base = OTHER; note = 2'-O-methyl-cytidine with phosphorothioate linkage
  modified_base 21: mod_base = OTHER; note = 2'-O-methyl-cytidine with phosphorothioate linkage
  modified_base 22: mod_base = OTHER; note = 2'-O-methyl-guanosine
tgagcctctaggcttggaaccg

SEQ ID NO: 749 - RNA, 22 nt, synthetic construct
  source 1..22: mol_type = other RNA
  modified_base 1: mod_base = OTHER; note = 2'-O-methyl-uridine with phosphorothioate linkage
  modified_base 2: mod_base = OTHER; note = 2'-fluoro-cytidine with phosphorothioate linkage
  modified_base 3: mod_base = OTHER; note = 2'-fluoro-uridine
  modified_base 4: mod_base = OTHER; note = 2'-O-methyl-guanosine
  modified_base 5: mod_base = OTHER; note = 2'-fluoro-adenosine
  modified_base 6: mod_base = OTHER; note = 2'-O-methyl-guanosine
  modified_base 7: mod_base = OTHER; note = 2'-fluoro-cytidine
  modified_base 8: mod_base = OTHER; note = 2'-O-methyl-adenosine
  modified_base 9: mod_base = OTHER; note = 2'-O-methyl-uridine
  modified_base 10: mod_base = OTHER; note = 2'-fluoro-cytidine
  modified_base 11: mod_base = OTHER; note = 2'-O-methyl-guanosine
  modified_base 12: mod_base = OTHER; note = 2'-O-methyl-cytidine
  modified_base 13: mod_base = OTHER; note = 2'-O-methyl-guanosine
  modified_base 14: mod_base = OTHER; note = 2'-fluoro-uridine
  modified_base 15: mod_base = OTHER; note = 2'-O-methyl-cytidine
  modified_base 16: mod_base = OTHER; note = 2'-fluoro-adenosine
  modified_base 17: mod_base = OTHER; note = 2'-O-methyl-guanosine
  modified_base 18: mod_base = OTHER; note = 2'-O-methyl-guanosine
  modified_base 19: mod_base = OTHER; note = 2'-O-methyl-uridine
  modified_base 20: mod_base = OTHER; note = 2'-O-methyl-uridine with phosphorothioate linkage
  modified_base 21: mod_base = OTHER; note = 2'-O-methyl-guanosine with phosphorothioate linkage
  modified_base 22: mod_base = OTHER; note = 2'-O-methyl-cytidine
tctgagcatcgcgtcaggttgc

SEQ ID NO: 750 - RNA, 22 nt, synthetic construct
  source 1..22: mol_type = other RNA
  modified_base 1: mod_base = OTHER; note = 2'-O-methyl-uridine with phosphorothioate linkage
  modified_base 2: mod_base = OTHER; note = 2'-fluoro-adenosine with phosphorothioate linkage
  modified_base 3: mod_base = OTHER; note = 2'-fluoro-uridine
  modified_base 4: mod_base = OTHER; note = 2'-O-methyl-guanosine
  modified_base 5: mod_base = OTHER; note = 2'-fluoro-adenosine
  modified_base 6: mod_base = OTHER; note = 2'-O-methyl-cytidine
  modified_base 7: mod_base = OTHER; note = 2'-fluoro-cytidine
  modified_base 8: mod_base = OTHER; note = 2'-O-methyl-adenosine
  modified_base 9: mod_base = OTHER; note = 2'-O-methyl-adenosine
  modified_base 10: mod_base = OTHER; note = 2'-fluoro-guanosine
  modified_base 11: mod_base = OTHER; note = 2'-O-methyl-cytidine
  modified_base 12: mod_base = OTHER; note = 2'-O-methyl-uridine
  modified_base 13: mod_base = OTHER; note = 2'-O-methyl-uridine
  modified_base 14: mod_base = OTHER; note = 2'-fluoro-guanosine
  modified_base 15: mod_base = OTHER; note = 2'-O-methyl-guanosine
  modified_base 16: mod_base = OTHER; note = 2'-fluoro-cytidine
  modified_base 17: mod_base = OTHER; note = 2'-O-methyl-adenosine
  modified_base 18: mod_base = OTHER; note = 2'-O-methyl-adenosine
  modified_base 19: mod_base = OTHER; note = 2'-O-methyl-guanosine
  modified_base 20: mod_base = OTHER; note = 2'-O-methyl-uridine with phosphorothioate linkage
  modified_base 21: mod_base = OTHER; note = 2'-O-methyl-uridine with phosphorothioate linkage
  modified_base 22: mod_base = OTHER; note = 2'-O-methyl-cytidine
tatgaccaagcttggcaagttc

SEQ ID NO: 751 - RNA, 22 nt, synthetic construct
  source 1..22: mol_type = other RNA
  modified_base 1: mod_base = OTHER; note = 2'-O-methyl-uridine with phosphorothioate linkage
  modified_base 2: mod_base = OTHER; note = 2'-fluoro-uridine with phosphorothioate linkage
  modified_base 3: mod_base = OTHER; note = 2'-fluoro-guanosine
  modified_base 4: mod_base = OTHER; note = 2'-O-methyl-uridine
  modified_base 5: mod_base = OTHER; note = 2'-fluoro-cytidine
  modified_base 6: mod_base = OTHER; note = 2'-O-methyl-cytidine
  modified_base 7: mod_base = OTHER; note = 2'-fluoro-uridine
  modified_base 8: mod_base = OTHER; note = 2'-O-methyl-cytidine
  modified_base 9: mod_base = OTHER; note = 2'-O-methyl-uridine
  modified_base 10: mod_base = OTHER; note = 2'-fluoro-guanosine
  modified_base 11: mod_base = OTHER; note = 2'-O-methyl-adenosine
  modified_base 12: mod_base = OTHER; note = 2'-O-methyl-uridine
  modified_base 13: mod_base = OTHER; note = 2'-O-methyl-guanosine
  modified_base 14: mod_base = OTHER; note = 2'-fluoro-cytidine
  modified_base 15: mod_base = OTHER; note = 2'-O-methyl-cytidine
  modified_base 16: mod_base = OTHER; note = 2'-fluoro-adenosine
  modified_base 17: mod_base = OTHER; note = 2'-O-methyl-guanosine
  modified_base 18: mod_base = OTHER; note = 2'-O-methyl-uridine
  modified_base 19: mod_base = OTHER; note = 2'-O-methyl-guanosine
  modified_base 20: mod_base = OTHER; note = 2'-O-methyl-uridine with phosphorothioate linkage
  modified_base 21: mod_base = OTHER; note = 2'-O-methyl-guanosine with phosphorothioate linkage
  modified_base 22: mod_base = OTHER; note = 2'-O-methyl-guanosine
ttgtcctctgatgccagtgtgg

SEQ ID NO: 752 - RNA, 22 nt, synthetic construct
  source 1..22: mol_type = other RNA
  modified_base 1: mod_base = OTHER; note = 2'-O-methyl-uridine with phosphorothioate linkage
  modified_base 2: mod_base = OTHER; note = 2'-fluoro-guanosine with phosphorothioate linkage
  modified_base 3: mod_base = OTHER; note = 2'-fluoro-uridine
  modified_base 4: mod_base = OTHER; note = 2'-O-methyl-uridine
  modified_base 5: mod_base = OTHER; note = 2'-fluoro-cytidine
  modified_base 6: mod_base = OTHER; note = 2'-O-methyl-cytidine
  modified_base 7: mod_base = OTHER; note = 2'-fluoro-uridine
  modified_base 8: mod_base = OTHER; note = 2'-O-methyl-guanosine
  modified_base 9: mod_base = OTHER; note = 2'-O-methyl-guanosine
  modified_base 10: mod_base = OTHER; note = 2'-fluoro-uridine
  modified_base 11: mod_base = OTHER; note = 2'-O-methyl-cytidine
  modified_base 12: mod_base = OTHER; note = 2'-O-methyl-adenosine
  modified_base 13: mod_base = OTHER; note = 2'-O-methyl-guanosine
  modified_base 14: mod_base = OTHER; note = 2'-fluoro-guanosine
  modified_base 15: mod_base = OTHER; note = 2'-O-methyl-cytidine
  modified_base 16: mod_base = OTHER; note = 2'-fluoro-cytidine
  modified_base 17: mod_base = OTHER; note = 2'-O-methyl-adenosine
  modified_base 18: mod_base = OTHER; note = 2'-O-methyl-guanosine
  modified_base 19: mod_base = OTHER; note = 2'-O-methyl-cytidine
  modified_base 20: mod_base = OTHER; note = 2'-O-methyl-adenosine with phosphorothioate linkage
  modified_base 21: mod_base = OTHER; note = 2'-O-methyl-uridine with phosphorothioate linkage
  modified_base 22: mod_base = OTHER; note = 2'-O-methyl-uridine
tgttcctggtcaggccagcatt

SEQ ID NO: 753 - RNA, 22 nt, synthetic construct
  source 1..22: mol_type = other RNA
  modified_base 1: mod_base = OTHER; note = 2'-O-methyl-uridine with phosphorothioate linkage
  modified_base 2: mod_base = OTHER; note = 2'-fluoro-cytidine with phosphorothioate linkage
  modified_base 3: mod_base = OTHER; note = 2'-fluoro-uridine
  modified_base 4: mod_base = OTHER; note = 2'-O-methyl-guanosine
  modified_base 5: mod_base = OTHER; note = 2'-fluoro-guanosine
  modified_base 6: mod_base = OTHER; note = 2'-O-methyl-guanosine
  modified_base 7: mod_base = OTHER; note = 2'-fluoro-adenosine
  modified_base 8: mod_base = OTHER; note = 2'-O-methyl-uridine
  modified_base 9: mod_base = OTHER; note = 2'-O-methyl-cytidine
  modified_base 10: mod_base = OTHER; note = 2'-fluoro-cytidine
  modified_base 11: mod_base = OTHER; note = 2'-O-methyl-adenosine
  modified_base 12: mod_base = OTHER; note = 2'-O-methyl-uridine
  modified_base 13: mod_base = OTHER; note = 2'-O-methyl-guanosine
  modified_base 14: mod_base = OTHER; note = 2'-fluoro-guanosine
  modified_base 15: mod_base = OTHER; note = 2'-O-methyl-uridine
  modified_base 16: mod_base = OTHER; note = 2'-fluoro-adenosine
  modified_base 17: mod_base = OTHER; note = 2'-O-methyl-uridine
  modified_base 18: mod_base = OTHER; note = 2'-O-methyl-adenosine
  modified_base 19: mod_base = OTHER; note = 2'-O-methyl-adenosine
  modified_base 20: mod_base = OTHER; note = 2'-O-methyl-cytidine with phosphorothioate linkage
  modified_base 21: mod_base = OTHER; note = 2'-O-methyl-adenosine with phosphorothioate linkage
  modified_base 22: mod_base = OTHER; note = 2'-O-methyl-cytidine
tctgggatccatggtataacac

SEQ ID NO: 754 - RNA, 22 nt, synthetic construct
  source 1..22: mol_type = other RNA
  modified_base 1: mod_base = OTHER; note = 2'-O-methyl-uridine with phosphorothioate linkage
  modified_base 2: mod_base = OTHER; note = 2'-fluoro-cytidine with phosphorothioate linkage
  modified_base 3: mod_base = OTHER; note = 2'-fluoro-cytidine
  modified_base 4: mod_base = OTHER; note = 2'-O-methyl-adenosine
  modified_base 5: mod_base = OTHER; note = 2'-fluoro-guanosine
  modified_base 6: mod_base = OTHER; note = 2'-O-methyl-guanosine
  modified_base 7: mod_base = OTHER; note = 2'-fluoro-cytidine
  modified_base 8: mod_base = OTHER; note = 2'-O-methyl-cytidine
  modified_base 9: mod_base = OTHER; note = 2'-O-methyl-uridine
  modified_base 10: mod_base = OTHER; note = 2'-fluoro-uridine
  modified_base 11: mod_base = OTHER; note = 2'-O-methyl-uridine
  modified_base 12: mod_base = OTHER; note = 2'-O-methyl-guanosine
  modified_base 13: mod_base = OTHER; note = 2'-O-methyl-cytidine
  modified_base 14: mod_base = OTHER; note = 2'-fluoro-uridine
  modified_base 15: mod_base = OTHER; note = 2'-O-methyl-cytidine
  modified_base 16: mod_base = OTHER; note = 2'-fluoro-adenosine
  modified_base 17: mod_base = OTHER; note = 2'-O-methyl-guanosine
  modified_base 18: mod_base = OTHER; note = 2'-O-methyl-uridine
  modified_base 19: mod_base = OTHER; note = 2'-O-methyl-uridine
  modified_base 20: mod_base = OTHER; note = 2'-O-methyl-guanosine with phosphorothioate linkage
  modified_base 21: mod_base = OTHER; note = 2'-O-methyl-guanosine with phosphorothioate linkage
  modified_base 22: mod_base = OTHER; note = 2'-O-methyl-uridine
tccaggcctttgctcagttggt

SEQ ID NO: 755 - RNA, 22 nt, synthetic construct
  source 1..22: mol_type = other RNA
  modified_base 1: mod_base = OTHER; note = 2'-O-methyl-uridine with phosphorothioate linkage
  modified_base 2: mod_base = OTHER; note = 2'-fluoro-guanosine with phosphorothioate linkage
  modified_base 3: mod_base = OTHER; note = 2'-fluoro-uridine
  modified_base 4: mod_base = OTHER; note = 2'-O-methyl-uridine
  modified_base 5: mod_base = OTHER; note = 2'-fluoro-guanosine
  modified_base 6: mod_base = OTHER; note = 2'-O-methyl-cytidine
  modified_base 7: mod_base = OTHER; note = 2'-fluoro-adenosine
  modified_base 8: mod_base = OTHER; note = 2'-O-methyl-guanosine
  modified_base 9: mod_base = OTHER; note = 2'-O-methyl-uridine
  modified_base 10: mod_base = OTHER; note = 2'-fluoro-adenosine
  modified_base 11: mod_base = OTHER; note = 2'-O-methyl-cytidine
  modified_base 12: mod_base = OTHER; note = 2'-O-methyl-uridine
  modified_base 13: mod_base = OTHER; note = 2'-O-methyl-cytidine
  modified_base 14: mod_base = OTHER; note = 2'-fluoro-cytidine
  modified_base 15: mod_base = OTHER; note = 2'-O-methyl-cytidine
  modified_base 16: mod_base = OTHER; note = 2'-fluoro-adenosine
  modified_base 17: mod_base = OTHER; note = 2'-O-methyl-cytidine
  modified_base 18: mod_base = OTHER; note = 2'-O-methyl-cytidine
  modified_base 19: mod_base = OTHER; note = 2'-O-methyl-uridine
  modified_base 20: mod_base = OTHER; note = 2'-O-methyl-guanosine with phosphorothioate linkage
  modified_base 21: mod_base = OTHER; note = 2'-O-methyl-adenosine with phosphorothioate linkage
  modified_base 22: mod_base = OTHER; note = 2'-O-methyl-uridine
tgttgcagtactcccacctgat

SEQ ID NO: 756 - RNA, 22 nt, synthetic construct
  source 1..22: mol_type = other RNA
  modified_base 1: mod_base = OTHER; note = 2'-O-methyl-uridine with phosphorothioate linkage
  modified_base 2: mod_base = OTHER; note = 2'-fluoro-guanosine with phosphorothioate linkage
  modified_base 3: mod_base = OTHER; note = 2'-fluoro-guanosine
  modified_base 4: mod_base = OTHER; note = 2'-O-methyl-adenosine
  modified_base 5: mod_base = OTHER; note = 2'-fluoro-guanosine
  modified_base 6: mod_base = OTHER; note = 2'-O-methyl-adenosine
  modified_base 7: mod_base = OTHER; note = 2'-fluoro-adenosine
  modified_base 8: mod_base = OTHER; note = 2'-O-methyl-uridine
  modified_base 9: mod_base = OTHER; note = 2'-O-methyl-guanosine
  modified_base 10: mod_base = OTHER; note = 2'-fluoro-uridine
  modified_base 11: mod_base = OTHER; note = 2'-O-methyl-guanosine
  modified_base 12: mod_base = OTHER; note = 2'-O-methyl-cytidine
  modified_base 13: mod_base = OTHER; note = 2'-O-methyl-cytidine
  modified_base 14: mod_base = OTHER; note = 2'-fluoro-uridine
  modified_base 15: mod_base = OTHER; note = 2'-O-methyl-cytidine
  modified_base 16: mod_base = OTHER; note = 2'-fluoro-guanosine
  modified_base 17: mod_base = OTHER; note = 2'-O-methyl-adenosine
  modified_base 18: mod_base = OTHER; note = 2'-O-methyl-uridine
  modified_base 19: mod_base = OTHER; note = 2'-O-methyl-adenosine
  modified_base 20: mod_base = OTHER; note = 2'-O-methyl-adenosine with phosphorothioate linkage
  modified_base 21: mod_base = OTHER; note = 2'-O-methyl-cytidine with phosphorothioate linkage
  modified_base 22: mod_base = OTHER; note = 2'-O-methyl-uridine
tggagaatgtgcctcgataact

SEQ ID NO: 757 - RNA, 22 nt, synthetic construct
  source 1..22: mol_type = other RNA
  modified_base 1: mod_base = OTHER; note = 2'-O-methyl-uridine with phosphorothioate linkage
  modified_base 2: mod_base = OTHER; note = 2'-fluoro-cytidine with phosphorothioate linkage
  modified_base 3: mod_base = OTHER; note = 2'-fluoro-uridine
  modified_base 4: mod_base = OTHER; note = 2'-O-methyl-guanosine
  modified_base 5: mod_base = OTHER; note = 2'-fluoro-guanosine
  modified_base 6: mod_base = OTHER; note = 2'-O-methyl-adenosine
  modified_base 7: mod_base = OTHER; note = 2'-fluoro-cytidine
  modified_base 8: mod_base = OTHER; note = 2'-O-methyl-cytidine
  modified_base 9: mod_base = OTHER; note = 2'-O-methyl-cytidine
  modified_base 10: mod_base = OTHER; note = 2'-fluoro-cytidine
  modified_base 11: mod_base = OTHER; note = 2'-O-methyl-guanosine
  modified_base 12: mod_base = OTHER; note = 2'-O-methyl-guanosine
  modified_base 13: mod_base = OTHER; note = 2'-O-methyl-guanosine
  modified_base 14: mod_base = OTHER; note = 2'-fluoro-guanosine
  modified_base 15: mod_base = OTHER; note = 2'-O-methyl-cytidine
  modified_base 16: mod_base = OTHER; note = 2'-fluoro-uridine
  modified_base 17: mod_base = OTHER; note = 2'-O-methyl-uridine
  modified_base 18: mod_base = OTHER; note = 2'-O-methyl-uridine
  modified_base 19: mod_base = OTHER; note = 2'-O-methyl-guanosine
  modified_base 20: mod_base = OTHER; note = 2'-O-methyl-cytidine with phosphorothioate linkage
  modified_base 21: mod_base = OTHER; note = 2'-O-methyl-uridine with phosphorothioate linkage
  modified_base 22: mod_base = OTHER; note = 2'-O-methyl-cytidine
tctggaccccggggctttgctc

SEQ ID NO: 758 - RNA, 22 nt, synthetic construct
  source 1..22: mol_type = other RNA
  modified_base 1: mod_base = OTHER; note = 2'-O-methyl-uridine with phosphorothioate linkage
  modified_base 2: mod_base = OTHER; note = 2'-fluoro-cytidine with phosphorothioate linkage
  modified_base 3: mod_base = OTHER; note = 2'-fluoro-adenosine
  modified_base 4: mod_base = OTHER; note = 2'-O-methyl-cytidine
  modified_base 5: mod_base = OTHER; note = 2'-fluoro-adenosine
  modified_base 6: mod_base = OTHER; note = 2'-O-methyl-uridine
  modified_base 7: mod_base = OTHER; note = 2'-fluoro-guanosine
  modified_base 8: mod_base = OTHER; note = 2'-O-methyl-guanosine
  modified_base 9: mod_base = OTHER; note = 2'-O-methyl-cytidine
  modified_base 10: mod_base = OTHER; note = 2'-fluoro-uridine
  modified_base 11: mod_base = OTHER; note = 2'-O-methyl-uridine
  modified_base 12: mod_base = OTHER; note = 2'-O-methyl-uridine
  modified_base 13: mod_base = OTHER; note = 2'-O-methyl-guanosine
  modified_base 14: mod_base = OTHER; note = 2'-fluoro-cytidine
  modified_base 15: mod_base = OTHER; note = 2'-O-methyl-uridine
  modified_base 16: mod_base = OTHER; note = 2'-fluoro-cytidine
  modified_base 17: mod_base = OTHER; note = 2'-O-methyl-adenosine
  modified_base 18: mod_base = OTHER; note = 2'-O-methyl-guanosine
  modified_base 19: mod_base = OTHER; note = 2'-O-methyl-guanosine
  modified_base 20: mod_base = OTHER; note = 2'-O-methyl-uridine with phosphorothioate linkage
  modified_base 21: mod_base = OTHER; note = 2'-O-methyl-guanosine with phosphorothioate linkage
  modified_base 22: mod_base = OTHER; note = 2'-O-methyl-cytidine
tcacatggctttgctcaggtgc

SEQ ID NO: 759 - RNA, 22 nt, synthetic construct
  source 1..22: mol_type = other RNA
  modified_base 1: mod_base = OTHER; note = 2'-O-methyl-uridine with phosphorothioate linkage
  modified_base 2: mod_base = OTHER; note = 2'-fluoro-cytidine with phosphorothioate linkage
  modified_base 3: mod_base = OTHER; note = 2'-fluoro-uridine
  modified_base 4: mod_base = OTHER; note = 2'-O-methyl-guanosine
  modified_base 5: mod_base = OTHER; note = 2'-fluoro-cytidine
  modified_base 6: mod_base = OTHER; note = 2'-O-methyl-adenosine
  modified_base 7: mod_base = OTHER; note = 2'-fluoro-uridine
  modified_base 8: mod_base = OTHER; note = 2'-O-methyl-cytidine
  modified_base 9: mod_base = OTHER; note = 2'-O-methyl-uridine
  modified_base 10: mod_base = OTHER; note = 2'-fluoro-guanosine
  modified_base 11: mod_base = OTHER; note = 2'-O-methyl-adenosine
  modified_base 12: mod_base = OTHER; note = 2'-O-methyl-guanosine
  modified_base 13: mod_base = OTHER; note = 2'-O-methyl-cytidine
  modified_base 14: mod_base = OTHER; note = 2'-fluoro-adenosine
  modified_base 15: mod_base = OTHER; note = 2'-O-methyl-uridine
  modified_base 16: mod_base = OTHER; note = 2'-fluoro-cytidine
  modified_base 17: mod_base = OTHER; note = 2'-O-methyl-guanosine
  modified_base 18: mod_base = OTHER; note = 2'-O-methyl-uridine
  modified_base 19: mod_base = OTHER; note = 2'-O-methyl-guanosine
  modified_base 20: mod_base = OTHER; note = 2'-O-methyl-uridine with phosphorothioate linkage
  modified_base 21: mod_base = OTHER; note = 2'-O-methyl-cytidine with phosphorothioate linkage
  modified_base 22: mod_base = OTHER; note = 2'-O-methyl-adenosine
tctgcatctgagcatcgtgtca

SEQ ID NO: 760 - RNA, 22 nt, synthetic construct
  source 1..22: mol_type = other RNA
  modified_base 1: mod_base = OTHER; note = 2'-O-methyl-uridine with phosphorothioate linkage
  modified_base 2: mod_base = OTHER; note = 2'-fluoro-uridine with phosphorothioate linkage
  modified_base 3: mod_base = OTHER; note = 2'-fluoro-guanosine
  modified_base 4: mod_base = OTHER; note = 2'-O-methyl-adenosine
  modified_base 5: mod_base = OTHER; note = 2'-fluoro-cytidine
  modified_base 6: mod_base = OTHER; note = 2'-O-methyl-cytidine
  modified_base 7: mod_base = OTHER; note = 2'-fluoro-adenosine
  modified_base 8: mod_base = OTHER; note = 2'-O-methyl-adenosine
  modified_base 9: mod_base = OTHER; note = 2'-O-methyl-guanosine
  modified_base 10: mod_base = OTHER; note = 2'-fluoro-adenosine
  modified_base 11: mod_base = OTHER; note = 2'-O-methyl-uridine
  modified_base 12: mod_base = OTHER; note = 2'-O-methyl-uridine
  modified_base 13: mod_base = OTHER; note = 2'-O-methyl-guanosine
  modified_base 14: mod_base = OTHER; note = 2'-fluoro-adenosine
  modified_base 15: mod_base = OTHER; note = 2'-O-methyl-cytidine
  modified_base 16: mod_base = OTHER; note = 2'-fluoro-adenosine
  modified_base 17: mod_base = OTHER; note = 2'-O-methyl-uridine
  modified_base 18: mod_base = OTHER; note = 2'-O-methyl-guanosine
  modified_base 19: mod_base = OTHER; note = 2'-O-methyl-uridine
  modified_base 20: mod_base = OTHER; note = 2'-O-methyl-cytidine with phosphorothioate linkage
  modified_base 21: mod_base = OTHER; note = 2'-O-methyl-cytidine with phosphorothioate linkage
  modified_base 22: mod_base = OTHER; note = 2'-O-methyl-uridine
ttgaccaagattgacatgtcct

SEQ ID NO: 761 - RNA, 22 nt, synthetic construct
  source 1..22: mol_type = other RNA
  modified_base 1: mod_base = OTHER; note = 2'-O-methyl-uridine with phosphorothioate linkage
  modified_base 2: mod_base = OTHER; note = 2'-fluoro-guanosine with phosphorothioate linkage
  modified_base 3: mod_base = OTHER; note = 2'-fluoro-guanosine
  modified_base 4: mod_base = OTHER; note = 2'-O-methyl-guanosine
  modified_base 5: mod_base = OTHER; note = 2'-fluoro-guanosine
  modified_base 6: mod_base = OTHER; note = 2'-O-methyl-cytidine
  modified_base 7: mod_base = OTHER; note = 2'-fluoro-uridine
  modified_base 8: mod_base = OTHER; note = 2'-O-methyl-guanosine
  modified_base 9: mod_base = OTHER; note = 2'-O-methyl-cytidine
  modified_base 10: mod_base = OTHER; note = 2'-fluoro-cytidine
  modified_base 11: mod_base = OTHER; note = 2'-O-methyl-adenosine
  modified_base 12: mod_base = OTHER; note = 2'-O-methyl-cytidine
  modified_base 13: mod_base = OTHER; note = 2'-O-methyl-adenosine
  modified_base 14: mod_base = OTHER; note = 2'-fluoro-guanosine
  modified_base 15: mod_base = OTHER; note = 2'-O-methyl-guanosine
  modified_base 16: mod_base = OTHER; note = 2'-fluoro-adenosine
  modified_base 17: mod_base = OTHER; note = 2'-O-methyl-uridine
  modified_base 18: mod_base = OTHER; note = 2'-O-methyl-cytidine
  modified_base 19: mod_base = OTHER; note = 2'-O-methyl-uridine
  modified_base 20: mod_base = OTHER; note = 2'-O-methyl-guanosine with phosphorothioate linkage
  modified_base 21: mod_base = OTHER; note = 2'-O-methyl-guanosine with phosphorothioate linkage
  modified_base 22: mod_base = OTHER; note = 2'-O-methyl-adenosine
tggggctgccacaggatctgga

SEQ ID NO: 762 - RNA, 22 nt, synthetic construct
  source 1..22: mol_type = other RNA
  modified_base 1: mod_base = OTHER; note = 2'-O-methyl-uridine with phosphorothioate linkage
  modified_base 2: mod_base = OTHER; note = 2'-fluoro-adenosine with phosphorothioate linkage
  modified_base 3: mod_base = OTHER; note = 2'-fluoro-cytidine
  modified_base 4: mod_base = OTHER; note = 2'-O-methyl-cytidine
  modified_base 5: mod_base = OTHER; note = 2'-fluoro-guanosine
  modified_base 6: mod_base = OTHER; note = 2'-O-methyl-uridine
  modified_base 7: mod_base = OTHER; note = 2'-fluoro-guanosine
  modified_base 8: mod_base = OTHER; note = 2'-O-methyl-guanosine
  modified_base 9: mod_base = OTHER; note = 2'-O-methyl-guanosine
  modified_base 10: mod_base = OTHER; note = 2'-fluoro-adenosine
  modified_base 11: mod_base = OTHER; note = 2'-O-methyl-guanosine
  modified_base 12: mod_base = OTHER; note = 2'-O-methyl-uridine
  modified_base 13: mod_base = OTHER; note = 2'-O-methyl-uridine
  modified_base 14: mod_base = OTHER; note = 2'-fluoro-guanosine
  modified_base 15: mod_base = OTHER; note = 2'-O-methyl-uridine
  modified_base 16: mod_base = OTHER; note = 2'-fluoro-guanosine
  modified_base 17: mod_base = OTHER; note = 2'-O-methyl-adenosine
  modified_base 18: mod_base = OTHER; note = 2'-O-methyl-guanosine
  modified_base 19: mod_base = OTHER; note = 2'-O-methyl-guanosine
  modified_base 20: mod_base = OTHER; note = 2'-O-methyl-adenosine with phosphorothioate linkage
  modified_base 21: mod_base = OTHER; note = 2'-O-methyl-guanosine with phosphorothioate linkage
  modified_base 22: mod_base = OTHER; note = 2'-O-methyl-adenosine
taccgtgggagttgtgaggaga

SEQ ID NO: 763 - RNA, 22 nt, synthetic construct
  source 1..22: mol_type = other RNA
  modified_base 1: mod_base = OTHER; note = 2'-O-methyl-uridine with phosphorothioate linkage
  modified_base 2: mod_base = OTHER; note = 2'-fluoro-cytidine with phosphorothioate linkage
  modified_base 3: mod_base = OTHER; note = 2'-fluoro-adenosine
  modified_base 4: mod_base = OTHER; note = 2'-O-methyl-guanosine
  modified_base 5: mod_base = OTHER; note = 2'-fluoro-adenosine
  modified_base 6: mod_base = OTHER; note = 2'-O-methyl-adenosine
  modified_base 7: mod_base = OTHER; note = 2'-fluoro-guanosine
  modified_base 8: mod_base = OTHER; note = 2'-O-methyl-guanosine
  modified_base 9: mod_base = OTHER; note = 2'-O-methyl-adenosine
  modified_base 10: mod_base = OTHER; note = 2'-fluoro-guanosine
  modified_base 11: mod_base = OTHER; note = 2'-O-methyl-cytidine
  modified_base 12: mod_base = OTHER; note = 2'-O-methyl-cytidine
  modified_base 13: mod_base = OTHER; note = 2'-O-methyl-uridine
  modified_base 14: mod_base = OTHER; note = 2'-fluoro-cytidine
  modified_base 15: mod_base = OTHER; note = 2'-O-methyl-uridine
  modified_base 16: mod_base = OTHER; note = 2'-fluoro-adenosine
  modified_base 17: mod_base = OTHER; note = 2'-O-methyl-guanosine
  modified_base 18: mod_base = OTHER; note = 2'-O-methyl-guanosine
  modified_base 19: mod_base = OTHER; note = 2'-O-methyl-cytidine
  modified_base 20: mod_base = OTHER; note = 2'-O-methyl-uridine with phosphorothioate linkage
  modified_base 21: mod_base = OTHER; note = 2'-O-methyl-uridine with phosphorothioate linkage
  modified_base 22: mod_base = OTHER; note = 2'-O-methyl-guanosine
tcagaaggagcctctaggcttg

SEQ ID NO: 764 - RNA, 22 nt, synthetic construct
  source 1..22: mol_type = other RNA
  modified_base 1: mod_base = OTHER; note = 2'-O-methyl-uridine with phosphorothioate linkage
  modified_base 2: mod_base = OTHER; note = 2'-fluoro-uridine with phosphorothioate linkage
  modified_base 3: mod_base = OTHER; note = 2'-fluoro-cytidine
  modified_base 4: mod_base = OTHER; note = 2'-O-methyl-cytidine
  modified_base 5: mod_base = OTHER; note = 2'-fluoro-uridine
  modified_base 6: mod_base = OTHER; note = 2'-O-methyl-guanosine
  modified_base 7: mod_base = OTHER; note = 2'-fluoro-cytidine
  modified_base 8: mod_base = OTHER; note = 2'-O-methyl-adenosine
  modified_base 9: mod_base = OTHER; note = 2'-O-methyl-guanosine
  modified_base 10: mod_base = OTHER; note = 2'-fluoro-uridine
  modified_base 11: mod_base = OTHER; note = 2'-O-methyl-adenosine
  modified_base 12: mod_base = OTHER; note = 2'-O-methyl-guanosine
  modified_base 13: mod_base = OTHER; note = 2'-O-methyl-uridine
  modified_base 14: mod_base = OTHER; note = 2'-fluoro-uridine
  modified_base 15: mod_base = OTHER; note = 2'-O-methyl-cytidine
  modified_base 16: mod_base = OTHER; note = 2'-fluoro-adenosine
  modified_base 17: mod_base = OTHER; note = 2'-O-methyl-uridine
  modified_base 18: mod_base = OTHER; note = 2'-O-methyl-uridine
  modified_base 19: mod_base = OTHER; note = 2'-O-methyl-guanosine
  modified_base 20: mod_base = OTHER; note = 2'-O-methyl-uridine with phosphorothioate linkage
  modified_base 21: mod_base = OTHER; note = 2'-O-methyl-cytidine with phosphorothioate linkage
  modified_base 22: mod_base = OTHER; note = 2'-O-methyl-adenosine
ttcctgcagtagttcattgtca

SEQ ID NO: 765 - RNA, 22 nt, synthetic construct
  source 1..22: mol_type = other RNA
  modified_base 1: mod_base = OTHER; note = 2'-O-methyl-uridine with phosphorothioate linkage
  modified_base 2: mod_base = OTHER; note = 2'-fluoro-guanosine with phosphorothioate linkage
  modified_base 3: mod_base = OTHER; note = 2'-fluoro-guanosine
  modified_base 4: mod_base = OTHER; note = 2'-O-methyl-adenosine
  modified_base 5: mod_base = OTHER; note = 2'-fluoro-cytidine
  modified_base 6: mod_base = OTHER; note = 2'-O-methyl-adenosine
  modified_base 7: mod_base = OTHER; note = 2'-fluoro-cytidine
  modified_base 8: mod_base = OTHER; note = 2'-O-methyl-uridine
  modified_base 9: mod_base = OTHER; note = 2'-O-methyl-uridine
  modified_base 10: mod_base = OTHER; note = 2'-fluoro-guanosine
  modified_base 11: mod_base = OTHER; note = 2'-O-methyl-adenosine
  modified_base 12: mod_base = OTHER; note = 2'-O-methyl-uridine
  modified_base 13: mod_base = OTHER; note = 2'-O-methyl-uridine
  modified_base 14: mod_base = OTHER; note = 2'-fluoro-cytidine
  modified_base 15: mod_base = OTHER; note = 2'-O-methyl-uridine
  modified_base 16: mod_base = OTHER; note = 2'-fluoro-guanosine
  modified_base 17: mod_base = OTHER; note = 2'-O-methyl-uridine
  modified_base 18: mod_base = OTHER; note = 2'-O-methyl-cytidine
  modified_base 19: mod_base = OTHER; note = 2'-O-methyl-adenosine
  modified_base 20: mod_base = OTHER; note = 2'-O-methyl-cytidine with phosphorothioate linkage
  modified_base 21: mod_base = OTHER; note = 2'-O-methyl-uridine with phosphorothioate linkage
  modified_base 22: mod_base = OTHER; note = 2'-O-methyl-guanosine
tggacacttgattctgtcactg

SEQ ID NO: 766 - RNA, 22 nt, synthetic construct
  source 1..22: mol_type = other RNA
  modified_base 1: mod_base = OTHER; note = 2'-O-methyl-uridine with phosphorothioate linkage
  modified_base 2: mod_base = OTHER; note = 2'-fluoro-guanosine with phosphorothioate linkage
  modified_base 3: mod_base = OTHER; note = 2'-fluoro-guanosine
  modified_base 4: mod_base = OTHER; note = 2'-O-methyl-uridine
  modified_base 5: mod_base = OTHER; note = 2'-fluoro-cytidine
  modified_base 6: mod_base = OTHER; note = 2'-O-methyl-cytidine
  modified_base 7: mod_base = OTHER; note = 2'-fluoro-uridine
  modified_base 8: mod_base = OTHER; note = 2'-O-methyl-uridine
  modified_base 9: mod_base = OTHER; note = 2'-O-methyl-cytidine
  modified_base 10: mod_base = OTHER; note = 2'-fluoro-cytidine
  modified_base 11: mod_base = OTHER; note = 2'-O-methyl-uridine
  modified_base 12: mod_base = OTHER; note = 2'-O-methyl-guanosine
  modified_base 13: mod_base = OTHER; note = 2'-O-methyl-uridine
  modified_base 14: mod_base = OTHER; note = 2'-fluoro-guanosine
  modified_base 15: mod_base = OTHER; note = 2'-O-methyl-adenosine
  modified_base 16: mod_base = OTHER; note = 2'-fluoro-cytidine
  modified_base 17: mod_base = OTHER; note = 2'-O-methyl-adenosine
  modified_base 18: mod_base = OTHER; note = 2'-O-methyl-guanosine
  modified_base 19: mod_base = OTHER; note = 2'-O-methyl-uridine
  modified_base 20: mod_base = OTHER; note = 2'-O-methyl-guanosine with phosphorothioate linkage
  modified_base 21: mod_base = OTHER; note = 2'-O-methyl-guanosine with phosphorothioate linkage
  modified_base 22: mod_base = OTHER; note = 2'-O-methyl-uridine
tggtccttcctgtgacagtggt

SEQ ID NO: 767 - RNA, 22 nt, synthetic construct
  source 1..22: mol_type = other RNA
  modified_base 1: mod_base = OTHER; note = 2'-O-methyl-uridine with phosphorothioate linkage
  modified_base 2: mod_base = OTHER; note = 2'-fluoro-guanosine with phosphorothioate linkage
  modified_base 3: mod_base = OTHER; note = 2'-fluoro-uridine
  modified_base 4: mod_base = OTHER; note = 2'-O-methyl-guanosine
  modified_base 5: mod_base = OTHER; note = 2'-fluoro-uridine
  modified_base 6: mod_base = OTHER; note = 2'-O-methyl-cytidine
  modified_base 7: mod_base = OTHER; note = 2'-fluoro-adenosine
  modified_base 8: mod_base = OTHER; note = 2'-O-methyl-uridine
  modified_base 9: mod_base = OTHER; note = 2'-O-methyl-adenosine
  modified_base 10: mod_base = OTHER; note = 2'-fluoro-guanosine
  modified_base 11: mod_base = OTHER; note = 2'-O-methyl-adenosine
  modified_base 12: mod_base = OTHER; note = 2'-O-methyl-guanosine
  modified_base 13: mod_base = OTHER; note = 2'-O-methyl-guanosine
  modified_base 14: mod_base = OTHER; note = 2'-fluoro-adenosine
  modified_base 15: mod_base = OTHER; note = 2'-O-methyl-cytidine
  modified_base 16: mod_base = OTHER; note = 2'-fluoro-cytidine
  modified_base 17: mod_base = OTHER; note = 2'-O-methyl-adenosine
  modified_base 18: mod_base = OTHER; note = 2'-O-methyl-adenosine
  modified_base 19: mod_base = OTHER; note = 2'-O-methyl-guanosine
  modified_base 20: mod_base = OTHER; note = 2'-O-methyl-adenosine with phosphorothioate linkage
  modified_base 21: mod_base = OTHER; note = 2'-O-methyl-cytidine with phosphorothioate linkage
  modified_base 22: mod_base = OTHER; note = 2'-O-methyl-uridine
tgtgtcatagaggaccaagact

SEQ ID NO: 768 - RNA, 22 nt, synthetic construct
  source 1..22: mol_type = other RNA
  modified_base 1: mod_base = OTHER; note = 2'-O-methyl-uridine with phosphorothioate linkage
  modified_base 2: mod_base = OTHER; note = 2'-fluoro-cytidine with phosphorothioate linkage
  modified_base 3: mod_base = OTHER; note = 2'-fluoro-cytidine
  modified_base 4: mod_base = OTHER; note = 2'-O-methyl-uridine
  modified_base 5: mod_base = OTHER; note = 2'-fluoro-uridine
  modified_base 6: mod_base = OTHER; note = 2'-O-methyl-cytidine
  modified_base 7: mod_base = OTHER; note = 2'-fluoro-uridine
  modified_base 8: mod_base = OTHER; note = 2'-O-methyl-guanosine
  modified_base 9: mod_base = OTHER; note = 2'-O-methyl-cytidine
  modified_base 10: mod_base = OTHER; note = 2'-fluoro-guanosine
  modified_base 11: mod_base = OTHER; note = 2'-O-methyl-uridine
  modified_base 12: mod_base = OTHER; note = 2'-O-methyl-cytidine
  modified_base 13: mod_base = OTHER; note = 2'-O-methyl-uridine
  modified_base 14: mod_base = OTHER; note = 2'-fluoro-guanosine
  modified_base 15: mod_base = OTHER; note = 2'-O-methyl-adenosine
  modified_base 16: mod_base = OTHER; note = 2'-fluoro-guanosine
  modified_base 17: mod_base = OTHER; note = 2'-O-methyl-cytidine
  modified_base 18: mod_base = OTHER; note = 2'-O-methyl-adenosine
  modified_base 19: mod_base = OTHER; note = 2'-O-methyl-uridine
  modified_base 20: mod_base = OTHER; note = 2'-O-methyl-uridine with phosphorothioate linkage
  modified_base 21: mod_base = OTHER; note = 2'-O-methyl-guanosine with phosphorothioate linkage
  modified_base 22: mod_base = OTHER; note = 2'-O-methyl-uridine
tccttctgcgtctgagcattgt

SEQ ID NO: 769 - RNA, 22 nt, synthetic construct
  source 1..22: mol_type = other RNA
  modified_base 1: mod_base = OTHER; note = 2'-O-methyl-uridine with phosphorothioate linkage
  modified_base 2: mod_base = OTHER; note = 2'-fluoro-guanosine with phosphorothioate linkage
  modified_base 3: mod_base = OTHER; note = 2'-fluoro-guanosine
  modified_base 4: mod_base = OTHER; note = 2'-O-methyl-adenosine
  modified_base 5: mod_base = OTHER; note = 2'-fluoro-uridine
  modified_base 6: mod_base = OTHER; note = 2'-O-methyl-uridine
  modified_base 7: mod_base = OTHER; note = 2'-fluoro-cytidine
  modified_base 8: mod_base = OTHER; note = 2'-O-methyl-cytidine
  modified_base 9: mod_base = OTHER; note = 2'-O-methyl-uridine
  modified_base 10: mod_base = OTHER; note = 2'-fluoro-guanosine
  modified_base 11: mod_base = OTHER; note = 2'-O-methyl-cytidine
  modified_base 12: mod_base = OTHER; note = 2'-O-methyl-adenosine
  modified_base 13: mod_base = OTHER; note = 2'-O-methyl-guanosine
  modified_base 14: mod_base = OTHER; note = 2'-fluoro-uridine
  modified_base 15: mod_base = OTHER; note = 2'-O-methyl-adenosine
  modified_base 16: mod_base = OTHER; note = 2'-fluoro-guanosine
  modified_base 17: mod_base = OTHER; note = 2'-O-methyl-uridine
  modified_base 18: mod_base = OTHER; note = 2'-O-methyl-uridine
  modified_base 19: mod_base = OTHER; note = 2'-O-methyl-cytidine
  modified_base 20: mod_base = OTHER; note = 2'-O-methyl-adenosine with phosphorothioate linkage
  modified_base 21: mod_base = OTHER; note = 2'-O-methyl-uridine with phosphorothioate linkage
  modified_base 22: mod_base = OTHER; note = 2'-O-methyl-uridine
tggattcctgcagtagttcatt

SEQ ID NO: 770 - RNA, 22 nt, synthetic construct
  source 1..22: mol_type = other RNA
  modified_base 1: mod_base = OTHER; note = 2'-O-methyl-uridine with phosphorothioate linkage
  modified_base 2: mod_base = OTHER; note = 2'-fluoro-guanosine with phosphorothioate linkage
  modified_base 3: mod_base = OTHER; note = 2'-fluoro-guanosine
  modified_base 4: mod_base = OTHER; note = 2'-O-methyl-uridine
  modified_base 5: mod_base = OTHER; note = 2'-fluoro-adenosine
  modified_base 6: mod_base = OTHER; note = 2'-O-methyl-guanosine
  modified_base 7: mod_base = OTHER; note = 2'-fluoro-cytidine
  modified_base 8: mod_base = OTHER; note = 2'-O-methyl-adenosine
  modified_base 9: mod_base = OTHER; note = 2'-O-methyl-adenosine
  modified_base 10: mod_base = OTHER; note = 2'-fluoro-uridine
  modified_base 11: mod_base = OTHER; note = 2'-O-methyl-cytidine
  modified_base 12: mod_base = OTHER; note = 2'-O-methyl-cytidine
  modified_base 13: mod_base = OTHER; note = 2'-O-methyl-uridine
  modified_base 14: mod_base = OTHER; note = 2'-fluoro-guanosine
  modified_base 15: mod_base = OTHER; note = 2'-O-methyl-guanosine
  modified_base 16: mod_base = OTHER; note = 2'-fluoro-adenosine
  modified_base 17: mod_base = OTHER; note = 2'-O-methyl-cytidine
  modified_base 18: mod_base = OTHER; note = 2'-O-methyl-cytidine
  modified_base 19: mod_base = OTHER; note = 2'-O-methyl-adenosine
  modified_base 20: mod_base = OTHER; note = 2'-O-methyl-cytidine with phosphorothioate linkage
  modified_base 21: mod_base = OTHER; note = 2'-O-methyl-adenosine with phosphorothioate linkage
  modified_base 22: mod_base = OTHER; note = 2'-O-methyl-uridine
tggtagcaatcctggaccacat

SEQ ID NO: 771 - RNA, 22 nt, synthetic construct
  source 1..22: mol_type = other RNA
  modified_base 1: mod_base = OTHER; note = 2'-O-methyl-uridine with phosphorothioate linkage
  modified_base 2: mod_base = OTHER; note = 2'-fluoro-uridine with phosphorothioate linkage
  modified_base 3: mod_base = OTHER; note = 2'-fluoro-guanosine
  modified_base 4: mod_base = OTHER; note = 2'-O-methyl-guanosine
  modified_base 5: mod_base = OTHER; note = 2'-fluoro-uridine
  modified_base 6: mod_base = OTHER; note = 2'-O-methyl-adenosine
  modified_base 7: mod_base = OTHER; note = 2'-fluoro-guanosine
  modified_base 8: mod_base = OTHER; note = 2'-O-methyl-cytidine
  modified_base 9: mod_base = OTHER; note = 2'-O-methyl-adenosine
  modified_base 10: mod_base = OTHER; note = 2'-fluoro-cytidine
  modified_base 11: mod_base = OTHER; note = 2'-O-methyl-uridine
  modified_base 12: mod_base = OTHER; note = 2'-O-methyl-cytidine
  modified_base 13: mod_base = OTHER; note = 2'-O-methyl-cytidine
  modified_base 14: mod_base = OTHER; note = 2'-fluoro-uridine
  modified_base 15: mod_base = OTHER; note = 2'-O-methyl-guanosine
  modified_base 16: mod_base = OTHER; note = 2'-fluoro-cytidine
  modified_base 17: mod_base = OTHER; note = 2'-O-methyl-adenosine
  modified_base 18: mod_base = OTHER; note = 2'-O-methyl-cytidine
  modified_base 19: mod_base = OTHER; note = 2'-O-methyl-cytidine
  modified_base 20: mod_base = OTHER; note = 2'-O-methyl-cytidine with phosphorothioate linkage
  modified_base 21: mod_base = OTHER; note = 2'-O-methyl-cytidine with phosphorothioate linkage
  modified_base 22: mod_base = OTHER; note = 2'-O-methyl-adenosine
ttggtagcactcctgcacccca

SEQ ID NO: 772 - RNA, 22 nt, synthetic construct
  source 1..22: mol_type = other RNA
  modified_base 1: mod_base = OTHER; note = 2'-O-methyl-uridine with phosphorothioate linkage
  modified_base 2: mod_base = OTHER; note = 2'-fluoro-cytidine with phosphorothioate linkage
  modified_base 3: mod_base = OTHER; note = 2'-fluoro-uridine
  modified_base 4: mod_base = OTHER; note = 2'-O-methyl-guanosine
  modified_base 5: mod_base = OTHER; note = 2'-fluoro-guanosine
  modified_base 6: mod_base = OTHER; note = 2'-O-methyl-uridine
  modified_base 7: mod_base = OTHER; note = 2'-fluoro-guanosine
  modified_base 8: mod_base = OTHER; note = 2'-O-methyl-uridine
  modified_base 9: mod_base = OTHER; note = 2'-O-methyl-guanosine
  modified_base 10: mod_base = OTHER; note = 2'-fluoro-guanosine
  modified_base 11: mod_base = OTHER; note = 2'-O-methyl-uridine
  modified_base 12: mod_base = OTHER; note = 2'-O-methyl-guanosine
  modified_base 13: mod_base = OTHER; note = 2'-O-methyl-uridine
  modified_base 14: mod_base = OTHER; note = 2'-fluoro-cytidine
  modified_base 15: mod_base = OTHER; note = 2'-O-methyl-adenosine
  modified_base 16: mod_base = OTHER; note = 2'-fluoro-uridine
  modified_base 17: mod_base = OTHER; note = 2'-O-methyl-adenosine
  modified_base 18: mod_base = OTHER; note = 2'-O-methyl-guanosine
  modified_base 19: mod_base = OTHER; note = 2'-O-methyl-adenosine
  modified_base 20: mod_base = OTHER; note = 2'-O-methyl-uridine with phosphorothioate linkage
  modified_base 21: mod_base = OTHER; note = 2'-O-methyl-guanosine with phosphorothioate linkage
  modified_base 22: mod_base = OTHER; note = 2'-O-methyl-adenosine
tctggtgtggtgtcatagatga

SEQ ID NO: 773 - RNA, 22 nt, synthetic construct
  source 1..22: mol_type = other RNA
  modified_base 1: mod_base = OTHER; note = 2'-O-methyl-uridine with phosphorothioate linkage
  modified_base 2: mod_base = OTHER; note = 2'-fluoro-guanosine with phosphorothioate linkage
  modified_base 3: mod_base = OTHER; note = 2'-fluoro-uridine
  modified_base 4: mod_base = OTHER; note = 2'-O-methyl-cytidine
  modified_base 5: mod_base = OTHER; note = 2'-fluoro-uridine
  modified_base 6: mod_base = OTHER; note = 2'-O-methyl-cytidine
  modified_base 7: mod_base = OTHER; note = 2'-fluoro-uridine
  modified_base 8: mod_base = OTHER; note = 2'-O-methyl-adenosine
  modified_base 9: mod_base = OTHER; note = 2'-O-methyl-guanosine
  modified_base 10: mod_base = OTHER; note = 2'-fluoro-guanosine
  modified_base 11: mod_base = OTHER; note = 2'-O-methyl-adenosine
  modified_base 12: mod_base = OTHER; note = 2'-O-methyl-cytidine
  modified_base 13: mod_base = OTHER; note = 2'-O-methyl-adenosine
  modified_base 14: mod_base = OTHER; note = 2'-fluoro-cytidine
  modified_base 15: mod_base = OTHER; note = 2'-O-methyl-cytidine
  modified_base 16: mod_base = OTHER; note = 2'-fluoro-uridine
  modified_base 17: mod_base = OTHER; note = 2'-O-methyl-guanosine
  modified_base 18: mod_base = OTHER; note = 2'-O-methyl-adenosine
  modified_base 19: mod_base = OTHER; note = 2'-O-methyl-uridine
  modified_base 20: mod_base = OTHER; note = 2'-O-methyl-uridine with phosphorothioate linkage
  modified_base 21: mod_base = OTHER; note = 2'-O-methyl-cytidine with phosphorothioate linkage
  modified_base 22: mod_base = OTHER; note = 2'-O-methyl-uridine
tgtctctaggacacctgattct

SEQ ID NO: 774 - RNA, 22 nt, synthetic construct
  source 1..22: mol_type = other RNA
  modified_base 1: mod_base = OTHER; note = 2'-O-methyl-uridine with phosphorothioate linkage
  modified_base 2: mod_base = OTHER; note = 2'-fluoro-cytidine with phosphorothioate linkage
  modified_base 3: mod_base = OTHER; note = 2'-fluoro-cytidine
  modified_base 4: mod_base = OTHER; note = 2'-O-methyl-adenosine
  modified_base 5: mod_base = OTHER; note = 2'-fluoro-uridine
  modified_base 6: mod_base = OTHER; note = 2'-O-methyl-guanosine
  modified_base 7: mod_base = OTHER; note = 2'-fluoro-guanosine
  modified_base 8: mod_base = OTHER; note = 2'-O-methyl-uridine
  modified_base 9: mod_base = OTHER; note = 2'-O-methyl-adenosine
  modified_base 10: mod_base = OTHER; note = 2'-fluoro-guanosine
  modified_base 11: mod_base = OTHER; note = 2'-O-methyl-cytidine
  modified_base 12: mod_base = OTHER; note = 2'-O-methyl-adenosine
  modified_base 13: mod_base = OTHER; note = 2'-O-methyl-adenosine
  modified_base 14: mod_base = OTHER; note = 2'-fluoro-uridine
  modified_base 15: mod_base = OTHER; note = 2'-O-methyl-cytidine
  modified_base 16: mod_base = OTHER; note = 2'-fluoro-cytidine
  modified_base 17: mod_base = OTHER; note = 2'-O-methyl-uridine
  modified_base 18: mod_base = OTHER; note = 2'-O-methyl-guanosine
  modified_base 19: mod_base = OTHER; note = 2'-O-methyl-guanosine
  modified_base 20: mod_base = OTHER; note = 2'-O-methyl-adenosine with phosphorothioate linkage
  modified_base 21: mod_base = OTHER; note = 2'-O-methyl-cytidine with phosphorothioate linkage
  modified_base 22: mod_base = OTHER; note = 2'-O-methyl-cytidine
tccatggtagcaatcctggacc

SEQ ID NO: 775 - RNA, 22 nt, synthetic construct
  source 1..22: mol_type = other RNA
  modified_base 1: mod_base = OTHER; note = 2'-O-methyl-uridine with phosphorothioate linkage
  modified_base 2: mod_base = OTHER; note = 2'-fluoro-guanosine with phosphorothioate linkage
  modified_base 3: mod_base = OTHER; note = 2'-fluoro-adenosine
  modified_base 4: mod_base = OTHER; note = 2'-O-methyl-cytidine
  modified_base 5: mod_base = OTHER; note = 2'-fluoro-cytidine
  modified_base 6: mod_base = OTHER; note = 2'-O-methyl-adenosine
  modified_base 7: mod_base = OTHER; note = 2'-fluoro-cytidine
  modified_base 8: mod_base = OTHER; note = 2'-O-methyl-adenosine
  modified_base 9: mod_base = OTHER; note = 2'-O-methyl-uridine
  modified_base 10: mod_base = OTHER; note = 2'-fluoro-guanosine
  modified_base 11: mod_base = OTHER; note = 2'-O-methyl-guanosine
  modified_base 12: mod_base = OTHER; note = 2'-O-methyl-cytidine
  modified_base 13: mod_base = OTHER; note = 2'-O-methyl-uridine
  modified_base 14: mod_base = OTHER; note = 2'-fluoro-uridine
  modified_base 15: mod_base = OTHER; note = 2'-O-methyl-uridine
  modified_base 16: mod_base = OTHER; note = 2'-fluoro-guanosine
  modified_base 17: mod_base = OTHER; note = 2'-O-methyl-cytidine
  modified_base 18: mod_base = OTHER; note = 2'-O-methyl-uridine
  modified_base 19: mod_base = OTHER; note = 2'-O-methyl-cytidine
  modified_base 20: mod_base = OTHER; note = 2'-O-methyl-adenosine with phosphorothioate linkage
  modified_base 21: mod_base = OTHER; note = 2'-O-methyl-guanosine with phosphorothioate linkage
  modified_base 22: mod_base = OTHER; note = 2'-O-methyl-guanosine
tgaccacatggctttgctcagg

SEQ ID NO: 776 - RNA, 22 nt, synthetic construct
  source 1..22: mol_type = other RNA
  modified_base 1: mod_base = OTHER; note = 2'-O-methyl-uridine with phosphorothioate linkage
  modified_base 2: mod_base = OTHER; note = 2'-fluoro-adenosine with phosphorothioate linkage
  modified_base 3: mod_base = OTHER; note = 2'-fluoro-uridine
  modified_base 4: mod_base = OTHER; note = 2'-O-methyl-cytidine
  modified_base 5: mod_base = OTHER; note = 2'-fluoro-uridine
  modified_base 6: mod_base = OTHER; note = 2'-O-methyl-guanosine
  modified_base 7: mod_base = OTHER; note = 2'-fluoro-guanosine
  modified_base 8: mod_base = OTHER; note = 2'-O-methyl-adenosine
  modified_base 9: mod_base = OTHER; note = 2'-O-methyl-uridine
  modified_base 10: mod_base = OTHER; note = 2'-fluoro-uridine
  modified_base 11: mod_base = OTHER; note = 2'-O-methyl-uridine
  modified_base 12: mod_base = OTHER; note = 2'-O-methyl-cytidine
  modified_base 13: mod_base = OTHER; note = 2'-O-methyl-guanosine
  modified_base 14: mod_base = OTHER; note = 2'-fluoro-guanosine
  modified_base 15: mod_base = OTHER; note = 2'-O-methyl-cytidine
  modified_base 16: mod_base = OTHER; note = 2'-fluoro-adenosine
  modified_base 17: mod_base = OTHER; note = 2'-O-methyl-guanosine
  modified_base 18: mod_base = OTHER; note = 2'-O-methyl-uridine
  modified_base 19: mod_base = OTHER; note = 2'-O-methyl-adenosine
  modified_base 20: mod_base = OTHER; note = 2'-O-methyl-guanosine with phosphorothioate linkage
  modified_base 21: mod_base = OTHER; note = 2'-O-methyl-uridine with phosphorothioate linkage
  modified_base 22: mod_base = OTHER; note = 2'-O-methyl-uridine
tatctggatttcggcagtagtt

SEQ ID NO: 777 - RNA, 22 nt, synthetic construct
  source 1..22: mol_type = other RNA
  modified_base 1: mod_base = OTHER; note = 2'-O-methyl-uridine with phosphorothioate linkage
  modified_base 2: mod_base = OTHER; note = 2'-fluoro-cytidine with phosphorothioate linkage
  modified_base 3: mod_base = OTHER; note = 2'-fluoro-adenosine
  modified_base 4: mod_base = OTHER; note = 2'-O-methyl-cytidine
  modified_base 5: mod_base = OTHER; note = 2'-fluoro-cytidine
  modified_base 6: mod_base = OTHER; note = 2'-O-methyl-cytidine
  modified_base 7: mod_base = OTHER; note = 2'-fluoro-cytidine
  modified_base 8: mod_base = OTHER; note = 2'-O-methyl-adenosine
  modified_base 9: mod_base = OTHER; note = 2'-O-methyl-guanosine
  modified_base 10: mod_base = OTHER; note = 2'-fluoro-guanosine
  modified_base 11: mod_base = OTHER; note = 2'-O-methyl-cytidine
  modified_base 12: mod_base = OTHER; note = 2'-O-methyl-cytidine
  modified_base 13: mod_base = OTHER; note = 2'-O-methyl-uridine
  modified_base 14: mod_base = OTHER; note = 2'-fluoro-uridine
  modified_base 15: mod_base = OTHER; note = 2'-O-methyl-uridine
  modified_base 16: mod_base = OTHER; note = 2'-fluoro-guanosine
  modified_base 17: mod_base = OTHER; note = 2'-O-methyl-cytidine
  modified_base 18: mod_base = OTHER; note = 2'-O-methyl-uridine
  modified_base 19: mod_base = OTHER; note = 2'-O-methyl-cytidine
  modified_base 20: mod_base = OTHER; note = 2'-O-methyl-adenosine with phosphorothioate linkage
  modified_base 21: mod_base = OTHER; note = 2'-O-methyl-guanosine with phosphorothioate linkage
  modified_base 22: mod_base = OTHER; note = 2'-O-methyl-uridine
tcaccccaggcctttgctcagt

SEQ ID NO: 778 - RNA, 22 nt, synthetic construct
  source 1..22: mol_type = other RNA
  modified_base 1: mod_base = OTHER; note = 2'-O-methyl-uridine with phosphorothioate linkage
  modified_base 2: mod_base = OTHER; note = 2'-fluoro-uridine with phosphorothioate linkage
  modified_base 3: mod_base = OTHER; note = 2'-fluoro-guanosine
  modified_base 4: mod_base = OTHER; note = 2'-O-methyl-cytidine
  modified_base 5: mod_base = OTHER; note = 2'-fluoro-adenosine
  modified_base 6: mod_base = OTHER; note = 2'-O-methyl-cytidine
  modified_base 7: mod_base = OTHER; note = 2'-fluoro-cytidine
  modified_base 8: mod_base = OTHER; note = 2'-O-methyl-cytidine
  modified_base 9: mod_base = OTHER; note = 2'-O-methyl-cytidine
  modified_base 10: mod_base = OTHER; note = 2'-fluoro-adenosine
  modified_base 11: mod_base = OTHER; note = 2'-O-methyl-guanosine
  modified_base 12: mod_base = OTHER; note = 2'-O-methyl-guanosine
  modified_base 13: mod_base = OTHER; note = 2'-O-methyl-cytidine
  modified_base 14: mod_base = OTHER; note = 2'-fluoro-cytidine
  modified_base 15: mod_base = OTHER; note = 2'-O-methyl-uridine
  modified_base 16: mod_base = OTHER; note = 2'-fluoro-uridine
  modified_base 17: mod_base = OTHER; note = 2'-O-methyl-uridine
  modified_base 18: mod_base = OTHER; note = 2'-O-methyl-guanosine
  modified_base 19: mod_base = OTHER; note = 2'-O-methyl-cytidine
  modified_base 20: mod_base = OTHER; note = 2'-O-methyl-uridine with phosphorothioate linkage
  modified_base 21: mod_base = OTHER; note = 2'-O-methyl-cytidine with phosphorothioate linkage
  modified_base 22: mod_base = OTHER; note = 2'-O-methyl-adenosine
ttgcaccccaggcctttgctca

SEQ ID NO: 779 - RNA, 22 nt, synthetic construct
  source 1..22: mol_type = other RNA
  modified_base 1: mod_base = OTHER; note = 2'-O-methyl-uridine with phosphorothioate linkage
  modified_base 2: mod_base = OTHER; note = 2'-fluoro-uridine with phosphorothioate linkage
  modified_base 3: mod_base = OTHER; note = 2'-fluoro-guanosine
  modified_base 4: mod_base = OTHER; note = 2'-O-methyl-guanosine
  modified_base 5: mod_base = OTHER; note = 2'-fluoro-adenosine
  modified_base 6: mod_base = OTHER; note = 2'-O-methyl-uridine
  modified_base 7: mod_base = OTHER; note = 2'-fluoro-guanosine
  modified_base 8: mod_base = OTHER; note = 2'-O-methyl-adenosine
  modified_base 9: mod_base = OTHER; note = 2'-O-methyl-cytidine
  modified_base 10: mod_base = OTHER; note = 2'-fluoro-cytidine
  modified_base 11: mod_base = OTHER; note = 2'-O-methyl-adenosine
  modified_base 12: mod_base = OTHER; note = 2'-O-methyl-adenosine
  modified_base 13: mod_base = OTHER; note = 2'-O-methyl-guanosine
  modified_base 14: mod_base = OTHER; note = 2'-fluoro-adenosine
  modified_base 15: mod_base = OTHER; note = 2'-O-methyl-uridine
  modified_base 16: mod_base = OTHER; note = 2'-fluoro-uridine
  modified_base 17: mod_base = OTHER; note = 2'-O-methyl-guanosine
  modified_base 18: mod_base = OTHER; note = 2'-O-methyl-adenosine
  modified_base 19: mod_base = OTHER; note = 2'-O-methyl-cytidine
  modified_base 20: mod_base = OTHER; note = 2'-O-methyl-adenosine with phosphorothioate linkage
  modified_base 21: mod_base = OTHER; note = 2'-O-methyl-uridine with phosphorothioate linkage
  modified_base 22: mod_base = OTHER; note = 2'-O-methyl-guanosine
ttggatgaccaagattgacatg

SEQ ID NO: 780 - RNA, 22 nt, synthetic construct
  source 1..22: mol_type = other RNA
  modified_base 1: mod_base = OTHER; note = 2'-O-methyl-uridine with phosphorothioate linkage
  modified_base 2: mod_base = OTHER; note = 2'-fluoro-cytidine with phosphorothioate linkage
  modified_base 3: mod_base = OTHER; note = 2'-fluoro-uridine
  modified_base 4: mod_base = OTHER; note = 2'-O-methyl-guanosine
  modified_base 5: mod_base = OTHER; note = 2'-fluoro-uridine
  modified_base 6: mod_base = OTHER; note = 2'-O-methyl-uridine
  modified_base 7: mod_base = OTHER; note = 2'-fluoro-uridine
  modified_base 8: mod_base = OTHER; note = 2'-O-methyl-uridine
  modified_base 9: mod_base = OTHER; note = 2'-O-methyl-cytidine
  modified_base 10: mod_base = OTHER; note = 2'-fluoro-adenosine
  modified_base 11: mod_base = OTHER; note = 2'-O-methyl-guanosine
  modified_base 12: mod_base = OTHER; note = 2'-O-methyl-uridine
  modified_base 13: mod_base = OTHER; note = 2'-O-methyl-uridine
  modified_base 14: mod_base = OTHER; note = 2'-fluoro-guanosine
  modified_base 15: mod_base = OTHER; note = 2'-O-methyl-guanosine
  modified_base 16: mod_base = OTHER; note = 2'-fluoro-uridine
  modified_base 17: mod_base = OTHER; note = 2'-O-methyl-guanosine
  modified_base 18: mod_base = OTHER; note = 2'-O-methyl-cytidine
  modified_base 19: mod_base = OTHER; note = 2'-O-methyl-uridine
  modified_base 20: mod_base = OTHER; note = 2'-O-methyl-uridine with phosphorothioate linkage
  modified_base 21: mod_base = OTHER; note = 2'-O-methyl-cytidine with phosphorothioate linkage
  modified_base 22: mod_base = OTHER; note = 2'-O-methyl-uridine
tctgttttcagttggtgcttct

SEQ ID NO: 781 - RNA, 22 nt, synthetic construct
  source 1..22: mol_type = other RNA
  modified_base 1: mod_base = OTHER; note = 2'-O-methyl-uridine with phosphorothioate linkage
  modified_base 2: mod_base = OTHER; note = 2'-fluoro-cytidine with phosphorothioate linkage
  modified_base 3: mod_base = OTHER; note = 2'-fluoro-uridine
  modified_base 4: mod_base = OTHER; note = 2'-O-methyl-guanosine
  modified_base 5: mod_base = OTHER; note = 2'-fluoro-uridine
  modified_base 6: mod_base = OTHER; note = 2'-O-methyl-adenosine
  modified_base 7: mod_base = OTHER; note = 2'-fluoro-cytidine
  modified_base 8: mod_base = OTHER; note = 2'-O-methyl-cytidine
  modified_base 9: mod_base = OTHER; note = 2'-O-methyl-cytidine
  modified_base 10: mod_base = OTHER; note = 2'-fluoro-cytidine
  modified_base 11: mod_base = OTHER; note = 2'-O-methyl-guanosine
  modified_base 12: mod_base = OTHER; note = 2'-O-methyl-guanosine
  modified_base 13: mod_base = OTHER; note = 2'-O-methyl-guanosine
  modified_base 14: mod_base = OTHER; note = 2'-fluoro-guanosine
  modified_base 15: mod_base = OTHER; note = 2'-O-methyl-guanosine
  modified_base 16: mod_base = OTHER; note = 2'-fluoro-uridine
  modified_base 17: mod_base = OTHER; note = 2'-O-methyl-uridine
  modified_base 18: mod_base = OTHER; note = 2'-O-methyl-uridine
  modified_base 19: mod_base = OTHER; note = 2'-O-methyl-cytidine
  modified_base 20: mod_base = OTHER; note = 2'-O-methyl-cytidine with phosphorothioate linkage
  modified_base 21: mod_base = OTHER; note = 2'-O-methyl-uridine with phosphorothioate linkage
  modified_base 22: mod_base = OTHER; note = 2'-O-methyl-cytidine
tctgtaccccgggggtttcctc

SEQ ID NO: 782 - RNA, 22 nt, synthetic construct
  source 1..22: mol_type = other RNA
  modified_base 1: mod_base = OTHER; note = 2'-O-methyl-uridine with phosphorothioate linkage
  modified_base 2: mod_base = OTHER; note = 2'-fluoro-guanosine with phosphorothioate linkage
  modified_base 3: mod_base = OTHER; note = 2'-fluoro-guanosine
  modified_base 4: mod_base = OTHER; note = 2'-O-methyl-guanosine
  modified_base 5: mod_base = OTHER; note = 2'-fluoro-uridine
  modified_base 6: mod_base = OTHER; note = 2'-O-methyl-adenosine
  modified_base 7: mod_base = OTHER; note = 2'-fluoro-guanosine
  modified_base 8: mod_base = OTHER; note = 2'-O-methyl-uridine
  modified_base 9: mod_base = OTHER; note = 2'-O-methyl-uridine
  modified_base 10: mod_base = OTHER; note = 2'-fluoro-uridine
  modified_base 11: mod_base = OTHER; note = 2'-O-methyl-uridine
  modified_base 12: mod_base = OTHER; note = 2'-O-methyl-cytidine
  modified_base 13: mod_base = OTHER; note = 2'-O-methyl-uridine
  modified_base 14: mod_base = OTHER; note = 2'-fluoro-guanosine
  modified_base 15: mod_base = OTHER; note = 2'-O-methyl-guanosine
  modified_base 16: mod_base = OTHER; note = 2'-fluoro-guanosine
  modified_base 17: mod_base = OTHER; note = 2'-O-methyl-guanosine
  modified_base 18: mod_base = OTHER; note = 2'-O-methyl-uridine
  modified_base 19: mod_base = OTHER; note = 2'-O-methyl-cytidine
  modified_base 20: mod_base = OTHER; note = 2'-O-methyl-cytidine with phosphorothioate linkage
  modified_base 21: mod_base = OTHER; note = 2'-O-methyl-uridine with phosphorothioate linkage
  modified_base 22: mod_base = OTHER; note = 2'-O-methyl-cytidine
tgggtagttttctggggtcctc

SEQ ID NO: 783 - RNA, 22 nt, synthetic construct
  source 1..22: mol_type = other RNA
  modified_base 1: mod_base = OTHER; note = 2'-O-methyl-uridine with phosphorothioate linkage
  modified_base 2: mod_base = OTHER; note = 2'-fluoro-guanosine with phosphorothioate linkage
  modified_base 3: mod_base = OTHER; note = 2'-fluoro-guanosine
  modified_base 4: mod_base = OTHER; note = 2'-O-methyl-uridine
  modified_base 5: mod_base = OTHER; note = 2'-fluoro-guanosine
  modified_base 6: mod_base = OTHER; note = 2'-O-methyl-uridine
  modified_base 7: mod_base = OTHER; note = 2'-fluoro-guanosine
  modified_base 8: mod_base = OTHER; note = 2'-O-methyl-guanosine
  modified_base 9: mod_base = OTHER; note = 2'-O-methyl-uridine
  modified_base 10: mod_base = OTHER; note = 2'-fluoro-guanosine
  modified_base 11: mod_base = OTHER; note = 2'-O-methyl-uridine
  modified_base 12: mod_base = OTHER; note = 2'-O-methyl-cytidine
  modified_base 13: mod_base = OTHER; note = 2'-O-methyl-adenosine
  modified_base 14: mod_base = OTHER; note = 2'-fluoro-uridine
  modified_base 15: mod_base = OTHER; note = 2'-O-methyl-guanosine
  modified_base 16: mod_base = OTHER; note = 2'-fluoro-guanosine
  modified_base 17: mod_base = OTHER; note = 2'-O-methyl-adenosine
  modified_base 18: mod_base = OTHER; note = 2'-O-methyl-uridine
  modified_base 19: mod_base = OTHER; note = 2'-O-methyl-guanosine
  modified_base 20: mod_base = OTHER; note = 2'-O-methyl-adenosine with phosphorothioate linkage
  modified_base 21: mod_base = OTHER; note = 2'-O-methyl-cytidine with phosphorothioate linkage
  modified_base 22: mod_base = OTHER; note = 2'-O-methyl-cytidine
tggtgtggtgtcatggatgacc

SEQ ID NO: 784 - RNA, 22 nt, synthetic construct
  source 1..22: mol_type = other RNA
  modified_base 1: mod_base = OTHER; note = 2'-O-methyl-uridine with phosphorothioate linkage
  modified_base 2: mod_base = OTHER; note = 2'-fluoro-uridine with phosphorothioate linkage
  modified_base 3: mod_base = OTHER; note = 2'-fluoro-guanosine
  modified_base 4: mod_base = OTHER; note = 2'-O-methyl-uridine
  modified_base 5: mod_base = OTHER; note = 2'-fluoro-adenosine
  modified_base 6: mod_base = OTHER; note = 2'-O-methyl-cytidine
  modified_base 7: mod_base = OTHER; note = 2'-fluoro-cytidine
  modified_base 8: mod_base = OTHER; note = 2'-O-methyl-cytidine
  modified_base 9: mod_base = OTHER; note = 2'-O-methyl-cytidine
  modified_base 10: mod_base = OTHER; note = 2'-fluoro-guanosine
  modified_base 11: mod_base = OTHER; note = 2'-O-methyl-guanosine
  modified_base 12: mod_base = OTHER; note = 2'-O-methyl-guanosine
  modified_base 13: mod_base = OTHER; note = 2'-O-methyl-guanosine
  modified_base 14: mod_base = OTHER; note = 2'-fluoro-guanosine
  modified_base 15: mod_base = OTHER; note = 2'-O-methyl-uridine
  modified_base 16: mod_base = OTHER; note = 2'-fluoro-uridine
  modified_base 17: mod_base = OTHER; note = 2'-O-methyl-uridine
  modified_base 18: mod_base = OTHER; note = 2'-O-methyl-cytidine
  modified_base 19: mod_base = OTHER; note = 2'-O-methyl-cytidine
  modified_base 20: mod_base = OTHER; note = 2'-O-methyl-uridine with phosphorothioate linkage
  modified_base 21: mod_base = OTHER; note = 2'-O-methyl-cytidine with phosphorothioate linkage
  modified_base 22: mod_base = OTHER; note = 2'-O-methyl-adenosine
ttgtaccccgggggtttcctca

SEQ ID NO: 785 - RNA, 22 nt, synthetic construct
  source 1..22: mol_type = other RNA
  modified_base 1: mod_base = OTHER; note = 2'-O-methyl-uridine with phosphorothioate linkage
  modified_base 2: mod_base = OTHER; note = 2'-fluoro-cytidine with phosphorothioate linkage
  modified_base 3: mod_base = OTHER; note = 2'-fluoro-cytidine
  modified_base 4: mod_base = OTHER; note = 2'-O-methyl-adenosine
  modified_base 5: mod_base = OTHER; note = 2'-fluoro-adenosine
  modified_base 6: mod_base = OTHER; note = 2'-O-methyl-guanosine
  modified_base 7: mod_base = OTHER; note = 2'-fluoro-guanosine
  modified_base 8: mod_base = OTHER; note = 2'-O-methyl-guanosine
  modified_base 9: mod_base = OTHER; note = 2'-O-methyl-cytidine
  modified_base 10: mod_base = OTHER; note = 2'-fluoro-guanosine
  modified_base 11: mod_base = OTHER; note = 2'-O-methyl-adenosine
  modified_base 12: mod_base = OTHER; note = 2'-O-methyl-adenosine
  modified_base 13: mod_base = OTHER; note = 2'-O-methyl-uridine
  modified_base 14: mod_base = OTHER; note = 2'-fluoro-cytidine
  modified_base 15: mod_base = OTHER; note = 2'-O-methyl-uridine
  modified_base 16: mod_base = OTHER; note = 2'-fluoro-cytidine
  modified_base 17: mod_base = OTHER; note = 2'-O-methyl-adenosine
  modified_base 18: mod_base = OTHER; note = 2'-O-methyl-guanosine
  modified_base 19: mod_base = OTHER; note = 2'-O-methyl-cytidine
  modified_base 20: mod_base = OTHER; note = 2'-O-methyl-adenosine with phosphorothioate linkage
  modified_base 21: mod_base = OTHER; note = 2'-O-methyl-uridine with phosphorothioate linkage
  modified_base 22: mod_base = OTHER; note = 2'-O-methyl-cytidine
tccaagggcgaatctcagcatc

SEQ ID NO: 786 - RNA, 22 nt, synthetic construct
  source 1..22: mol_type = other RNA
  modified_base 1: mod_base = OTHER; note = 2'-O-methyl-uridine with phosphorothioate linkage
  modified_base 2: mod_base = OTHER; note = 2'-fluoro-uridine with phosphorothioate linkage
  modified_base 3: mod_base = OTHER; note = 2'-fluoro-guanosine
  modified_base 4: mod_base = OTHER; note = 2'-O-methyl-uridine
  modified_base 5: mod_base = OTHER; note = 2'-fluoro-guanosine
  modified_base 6: mod_base = OTHER; note = 2'-O-methyl-guanosine
  modified_base 7: mod_base = OTHER; note = 2'-fluoro-uridine
  modified_base 8: mod_base = OTHER; note = 2'-O-methyl-guanosine
  modified_base 9: mod_base = OTHER; note = 2'-O-methyl-uridine
  modified_base 10: mod_base = OTHER; note = 2'-fluoro-cytidine
  modified_base 11: mod_base = OTHER; note = 2'-O-methyl-adenosine
  modified_base 12: mod_base = OTHER; note = 2'-O-methyl-uridine
  modified_base 13: mod_base = OTHER; note = 2'-O-methyl-adenosine
  modified_base 14: mod_base = OTHER; note = 2'-fluoro-guanosine
  modified_base 15: mod_base = OTHER; note = 2'-O-methyl-adenosine
  modified_base 16: mod_base = OTHER; note = 2'-fluoro-uridine
  modified_base 17: mod_base = OTHER; note = 2'-O-methyl-guanosine
  modified_base 18: mod_base = OTHER; note = 2'-O-methyl-adenosine
  modified_base 19: mod_base = OTHER; note = 2'-O-methyl-cytidine
  modified_base 20: mod_base = OTHER; note = 2'-O-methyl-cytidine with phosphorothioate linkage
  modified_base 21: mod_base = OTHER; note = 2'-O-methyl-adenosine with phosphorothioate linkage
  modified_base 22: mod_base = OTHER; note = 2'-O-methyl-adenosine
ttgtggtgtcatagatgaccaa

SEQ ID NO: 787 - RNA, 22 nt, synthetic construct
  source 1..22: mol_type = other RNA
  modified_base 1: mod_base = OTHER; note = 2'-O-methyl-uridine with phosphorothioate linkage
  modified_base 2: mod_base = OTHER; note = 2'-fluoro-uridine with phosphorothioate linkage
  modified_base 3: mod_base = OTHER; note = 2'-fluoro-uridine
  modified_base 4: mod_base = OTHER; note = 2'-O-methyl-guanosine
  modified_base 5: mod_base = OTHER; note = 2'-fluoro-guanosine
  modified_base 6: mod_base = OTHER; note = 2'-O-methyl-guanosine
  modified_base 7: mod_base = OTHER; note = 2'-fluoro-adenosine
  modified_base 8: mod_base = OTHER; note = 2'-O-methyl-uridine
  modified_base 9: mod_base = OTHER; note = 2'-O-methyl-cytidine
  modified_base 10: mod_base = OTHER; note = 2'-fluoro-cytidine
  modified_base 11: mod_base = OTHER; note = 2'-O-methyl-adenosine
  modified_base 12: mod_base = OTHER; note = 2'-O-methyl-uridine
  modified_base 13: mod_base = OTHER; note = 2'-O-methyl-guanosine
  modified_base 14: mod_base = OTHER; note = 2'-fluoro-guanosine
  modified_base 15: mod_base = OTHER; note = 2'-O-methyl-uridine
  modified_base 16: mod_base = OTHER; note = 2'-fluoro-adenosine
  modified_base 17: mod_base = OTHER; note = 2'-O-methyl-uridine
  modified_base 18: mod_base = OTHER; note = 2'-O-methyl-adenosine
  modified_base 19: mod_base = OTHER; note = 2'-O-methyl-adenosine
  modified_base 20: mod_base = OTHER; note = 2'-O-methyl-cytidine with phosphorothioate linkage
  modified_base 21: mod_base = OTHER; note = 2'-O-methyl-adenosine with phosphorothioate linkage
  modified_base 22: mod_base = OTHER; note = 2'-O-methyl-cytidine
tttgggatccatggtataacac

SEQ ID NO: 788 - RNA, 22 nt, synthetic construct
  source 1..22: mol_type = other RNA
  modified_base 1: mod_base = OTHER; note = 2'-O-methyl-uridine with phosphorothioate linkage
  modified_base 2: mod_base = OTHER; note = 2'-fluoro-adenosine with phosphorothioate linkage
  modified_base 3: mod_base = OTHER; note = 2'-fluoro-guanosine
  modified_base 4: mod_base = OTHER; note = 2'-O-methyl-guanosine
  modified_base 5: mod_base = OTHER; note = 2'-fluoro-cytidine
  modified_base 6: mod_base = OTHER; note = 2'-O-methyl-cytidine
  modified_base 7: mod_base = OTHER; note = 2'-fluoro-uridine
  modified_base 8: mod_base = OTHER; note = 2'-O-methyl-uridine
  modified_base 9: mod_base = OTHER; note = 2'-O-methyl-uridine
  modified_base 10: mod_base = OTHER; note = 2'-fluoro-guanosine
  modified_base 11: mod_base = OTHER; note = 2'-O-methyl-cytidine
  modified_base 12: mod_base = OTHER; note = 2'-O-methyl-uridine
  modified_base 13: mod_base = OTHER; note = 2'-O-methyl-cytidine
  modified_base 14: mod_base = OTHER; note = 2'-fluoro-adenosine
  modified_base 15: mod_base = OTHER; note = 2'-O-methyl-guanosine
  modified_base 16: mod_base = OTHER; note = 2'-fluoro-uridine
  modified_base 17: mod_base = OTHER; note = 2'-O-methyl-cytidine
  modified_base 18: mod_base = OTHER; note = 2'-O-methyl-guanosine
  modified_base 19: mod_base = OTHER; note = 2'-O-methyl-guanosine
  modified_base 20: mod_base = OTHER; note = 2'-O-methyl-uridine with phosphorothioate linkage
  modified_base 21: mod_base = OTHER; note = 2'-O-methyl-guanosine with phosphorothioate linkage
  modified_base 22: mod_base = OTHER; note = 2'-O-methyl-cytidine
taggcctttgctcagtcggtgc

SEQ ID NO: 789 - RNA, 22 nt, synthetic construct
  source 1..22: mol_type = other RNA
  modified_base 1: mod_base = OTHER; note = 2'-O-methyl-uridine with phosphorothioate linkage
  modified_base 2: mod_base = OTHER; note = 2'-fluoro-guanosine with phosphorothioate linkage
  modified_base 3: mod_base = OTHER; note = 2'-fluoro-guanosine
  modified_base 4: mod_base = OTHER; note = 2'-O-methyl-adenosine
  modified_base 5: mod_base = OTHER; note = 2'-fluoro-uridine
  modified_base 6: mod_base = OTHER; note = 2'-O-methyl-cytidine
  modified_base 7: mod_base = OTHER; note = 2'-fluoro-uridine
  modified_base 8: mod_base = OTHER; note = 2'-O-methyl-guanosine
  modified_base 9: mod_base = OTHER; note = 2'-O-methyl-guanosine
  modified_base 10: mod_base = OTHER; note = 2'-fluoro-adenosine
  modified_base 11: mod_base = OTHER; note = 2'-O-methyl-uridine
  modified_base 12: mod_base = OTHER; note = 2'-O-methyl-uridine
  modified_base 13: mod_base = OTHER; note = 2'-O-methyl-cytidine
  modified_base 14: mod_base = OTHER; note = 2'-fluoro-cytidine
  modified_base 15: mod_base = OTHER; note = 2'-O-methyl-uridine
  modified_base 16: mod_base = OTHER; note = 2'-fluoro-guanosine
  modified_base 17: mod_base = OTHER; note = 2'-O-methyl-cytidine
  modified_base 18: mod_base = OTHER; note = 2'-O-methyl-adenosine
  modified_base 19: mod_base = OTHER; note = 2'-O-methyl-guanosine
  modified_base 20: mod_base = OTHER; note = 2'-O-methyl-uridine with phosphorothioate linkage
  modified_base 21: mod_base = OTHER; note = 2'-O-methyl-adenosine with phosphorothioate linkage
  modified_base 22: mod_base = OTHER; note = 2'-O-methyl-guanosine
tggatctggattcctgcagtag

SEQ ID NO: 790 - RNA, 22 nt, synthetic construct
  source 1..22: mol_type = other RNA
  modified_base 1: mod_base = OTHER; note = 2'-O-methyl-uridine with phosphorothioate linkage
  modified_base 2: mod_base = OTHER; note = 2'-fluoro-cytidine with phosphorothioate linkage
  modified_base 3: mod_base = OTHER; note = 2'-fluoro-uridine
  modified_base 4: mod_base = OTHER; note = 2'-O-methyl-guanosine
  modified_base 5: mod_base = OTHER; note = 2'-fluoro-guanosine
  modified_base 6: mod_base = OTHER; note = 2'-O-methyl-guanosine
  modified_base 7: mod_base = OTHER; note = 2'-fluoro-adenosine
  modified_base 8: mod_base = OTHER; note = 2'-O-methyl-uridine
  modified_base 9: mod_base = OTHER; note = 2'-O-methyl-cytidine
  modified_base 10: mod_base = OTHER; note = 2'-fluoro-cytidine
  modified_base 11: mod_base = OTHER; note = 2'-O-methyl-adenosine
  modified_base 12: mod_base = OTHER; note = 2'-O-methyl-uridine
  modified_base 13: mod_base = OTHER; note = 2'-O-methyl-guanosine
  modified_base 14: mod_base = OTHER; note = 2'-fluoro-guanosine
  modified_base 15: mod_base = OTHER; note = 2'-O-methyl-uridine
  modified_base 16: mod_base = OTHER; note = 2'-fluoro-guanosine
  modified_base 17: mod_base = OTHER; note = 2'-O-methyl-uridine
  modified_base 18: mod_base = OTHER; note = 2'-O-methyl-adenosine
  modified_base 19: mod_base = OTHER; note = 2'-O-methyl-adenosine
  modified_base 20: mod_base = OTHER; note = 2'-O-methyl-cytidine with phosphorothioate linkage
  modified_base 21: mod_base = OTHER; note = 2'-O-methyl-adenosine with phosphorothioate linkage
  modified_base 22: mod_base = OTHER; note = 2'-O-methyl-cytidine
tctgggatccatggtgtaacac

SEQ ID NO: 791 - RNA, 22 nt, synthetic construct
  source 1..22: mol_type = other RNA
  modified_base 1: mod_base = OTHER; note = 2'-O-methyl-uridine with phosphorothioate linkage
  modified_base 2: mod_base = OTHER; note = 2'-fluoro-uridine with phosphorothioate linkage
  modified_base 3: mod_base = OTHER; note = 2'-fluoro-uridine
  modified_base 4: mod_base = OTHER; note = 2'-O-methyl-guanosine
  modified_base 5: mod_base = OTHER; note = 2'-fluoro-guanosine
  modified_base 6: mod_base = OTHER; note = 2'-O-methyl-uridine
  modified_base 7: mod_base = OTHER; note = 2'-fluoro-guanosine
  modified_base 8: mod_base = OTHER; note = 2'-O-methyl-cytidine
  modified_base 9: mod_base = OTHER; note = 2'-O-methyl-uridine
  modified_base 10: mod_base = OTHER; note = 2'-fluoro-uridine
  modified_base 11: mod_base = OTHER; note = 2'-O-methyl-cytidine
  modified_base 12: mod_base = OTHER; note = 2'-O-methyl-uridine
  modified_base 13: mod_base = OTHER; note = 2'-O-methyl-uridine
  modified_base 14: mod_base = OTHER; note = 2'-fluoro-cytidine
  modified_base 15: mod_base = OTHER; note = 2'-O-methyl-adenosine
  modified_base 16: mod_base = OTHER; note = 2'-fluoro-guanosine
  modified_base 17: mod_base = OTHER; note = 2'-O-methyl-adenosine
  modified_base 18: mod_base = OTHER; note = 2'-O-methyl-adenosine
  modified_base 19: mod_base = OTHER; note = 2'-O-methyl-guanosine
  modified_base 20: mod_base = OTHER; note = 2'-O-methyl-guanosine with phosphorothioate linkage
  modified_base 21: mod_base = OTHER; note = 2'-O-methyl-adenosine with phosphorothioate linkage
  modified_base 22: mod_base = OTHER; note = 2'-O-methyl-adenosine
tttggtgcttcttcagaaggaa

SEQ ID NO: 792 - RNA, 22 nt, synthetic construct
  source 1..22: mol_type = other RNA
  modified_base 1: mod_base = OTHER; note = 2'-O-methyl-uridine with phosphorothioate linkage
  modified_base 2: mod_base = OTHER; note = 2'-fluoro-cytidine with phosphorothioate linkage
  modified_base 3: mod_base = OTHER; note = 2'-fluoro-uridine
  modified_base 4: mod_base = OTHER; note = 2'-O-methyl-guanosine
  modified_base 5: mod_base = OTHER; note = 2'-fluoro-uridine
  modified_base 6: mod_base = OTHER; note = 2'-O-methyl-cytidine
  modified_base 7: mod_base = OTHER; note = 2'-fluoro-cytidine
  modified_base 8: mod_base = OTHER; note = 2'-O-methyl-adenosine
  modified_base 9: mod_base = OTHER; note = 2'-O-methyl-uridine
  modified_base 10: mod_base = OTHER; note = 2'-fluoro-adenosine
  modified_base 11: mod_base = OTHER; note = 2'-O-methyl-adenosine
  modified_base 12: mod_base = OTHER; note = 2'-O-methyl-uridine
  modified_base 13: mod_base = OTHER; note = 2'-O-methyl-guanosine
  modified_base 14: mod_base = OTHER; note = 2'-fluoro-guanosine
  modified_base 15: mod_base = OTHER; note = 2'-O-methyl-uridine
  modified_base 16: mod_base = OTHER; note = 2'-fluoro-adenosine
  modified_base 17: mod_base = OTHER; note = 2'-O-methyl-guanosine
  modified_base 18: mod_base = OTHER; note = 2'-O-methyl-uridine
  modified_base 19: mod_base = OTHER; note = 2'-O-methyl-adenosine
  modified_base 20: mod_base = OTHER; note = 2'-O-methyl-guanosine with phosphorothioate linkage
  modified_base 21: mod_base = OTHER; note = 2'-O-methyl-cytidine with phosphorothioate linkage
  modified_base 22: mod_base = OTHER; note = 2'-O-methyl-adenosine
tctgtccataatggtagtagca

SEQ ID NO: 793 - RNA, 22 nt, synthetic construct
  source 1..22: mol_type = other RNA
  modified_base 1: mod_base = OTHER; note = 2'-O-methyl-uridine with phosphorothioate linkage
  modified_base 2: mod_base = OTHER; note = 2'-fluoro-cytidine with phosphorothioate linkage
  modified_base 3: mod_base = OTHER; note = 2'-fluoro-adenosine
  modified_base 4: mod_base = OTHER; note = 2'-O-methyl-uridine
  modified_base 5: mod_base = OTHER; note = 2'-fluoro-adenosine
  modified_base 6: mod_base = OTHER; note = 2'-O-methyl-guanosine
  modified_base 7: mod_base = OTHER; note = 2'-fluoro-adenosine
  modified_base 8: mod_base = OTHER; note = 2'-O-methyl-uridine
  modified_base 9: mod_base = OTHER; note = 2'-O-methyl-guanosine
  modified_base 10: mod_base = OTHER; note = 2'-fluoro-adenosine
  modified_base 11: mod_base = OTHER; note = 2'-O-methyl-cytidine
  modified_base 12: mod_base = OTHER; note = 2'-O-methyl-cytidine
  modified_base 13: mod_base = OTHER; note = 2'-O-methyl-adenosine
  modified_base 14: mod_base = OTHER; note = 2'-fluoro-adenosine
  modified_base 15: mod_base = OTHER; note = 2'-O-methyl-guanosine
  modified_base 16: mod_base = OTHER; note = 2'-fluoro-cytidine
  modified_base 17: mod_base = OTHER; note = 2'-O-methyl-uridine
  modified_base 18: mod_base = OTHER; note = 2'-O-methyl-uridine
  modified_base 19: mod_base = OTHER; note = 2'-O-methyl-guanosine
  modified_base 20: mod_base = OTHER; note = 2'-O-methyl-guanosine with phosphorothioate linkage
  modified_base 21: mod_base = OTHER; note = 2'-O-methyl-cytidine with phosphorothioate linkage
  modified_base 22: mod_base = OTHER; note = 2'-O-methyl-adenosine
tcatagatgaccaagcttggca

SEQ ID NO: 794 - RNA, 22 nt, synthetic construct
  source 1..22: mol_type = other RNA
  modified_base 1: mod_base = OTHER; note = 2'-O-methyl-uridine with phosphorothioate linkage
  modified_base 2: mod_base = OTHER; note = 2'-fluoro-guanosine with phosphorothioate linkage
  modified_base 3: mod_base = OTHER; note = 2'-fluoro-guanosine
  modified_base 4: mod_base = OTHER; note = 2'-O-methyl-guanosine
  modified_base 5: mod_base = OTHER; note = 2'-fluoro-guanosine
  modified_base 6: mod_base = OTHER; note = 2'-O-methyl-uridine
  modified_base 7: mod_base = OTHER; note = 2'-fluoro-cytidine
  modified_base 8: mod_base = OTHER; note = 2'-O-methyl-cytidine
  modified_base 9: mod_base = OTHER; note = 2'-O-methyl-adenosine
  modified_base 10: mod_base = OTHER; note = 2'-fluoro-uridine
  modified_base 11: mod_base = OTHER; note = 2'-O-methyl-guanosine
  modified_base 12: mod_base = OTHER; note = 2'-O-methyl-guanosine
  modified_base 13: mod_base = OTHER; note = 2'-O-methyl-uridine
  modified_base 14: mod_base = OTHER; note = 2'-fluoro-adenosine
  modified_base 15: mod_base = OTHER; note = 2'-O-methyl-adenosine
  modified_base 16: mod_base = OTHER; note = 2'-fluoro-adenosine
  modified_base 17: mod_base = OTHER; note = 2'-O-methyl-adenosine
  modified_base 18: mod_base = OTHER; note = 2'-O-methyl-cytidine
  modified_base 19: mod_base = OTHER; note = 2'-O-methyl-adenosine
  modified_base 20: mod_base = OTHER; note = 2'-O-methyl-cytidine with phosphorothioate linkage
  modified_base 21: mod_base = OTHER; note = 2'-O-methyl-cytidine with phosphorothioate linkage
  modified_base 22: mod_base = OTHER; note = 2'-O-methyl-adenosine
tggggtccatggtaaaacacca

SEQ ID NO: 795 - RNA, 22 nt, synthetic construct
  source 1..22: mol_type = other RNA
  modified_base 1: mod_base = OTHER; note = 2'-O-methyl-uridine with phosphorothioate linkage
  modified_base 2: mod_base = OTHER; note = 2'-fluoro-cytidine with phosphorothioate linkage
  modified_base 3: mod_base = OTHER; note = 2'-fluoro-uridine
  modified_base 4: mod_base = OTHER; note = 2'-O-methyl-cytidine
  modified_base 5: mod_base = OTHER; note = 2'-fluoro-cytidine
  modified_base 6: mod_base = OTHER; note = 2'-O-methyl-uridine
  modified_base 7: mod_base = OTHER; note = 2'-fluoro-guanosine
  modified_base 8: mod_base = OTHER; note = 2'-O-methyl-cytidine
  modified_base 9: mod_base = OTHER; note = 2'-O-methyl-adenosine
  modified_base 10: mod_base = OTHER; note = 2'-fluoro-cytidine
  modified_base 11: mod_base = OTHER; note = 2'-O-methyl-cytidine
  modified_base 12: mod_base = OTHER; note = 2'-O-methyl-cytidine
  modified_base 13: mod_base = OTHER; note = 2'-O-methyl-cytidine
  modified_base 14: mod_base = OTHER; note = 2'-fluoro-adenosine
  modified_base 15: mod_base = OTHER; note = 2'-O-methyl-guanosine
  modified_base 16: mod_base = OTHER; note = 2'-fluoro-guanosine
  modified_base 17: mod_base = OTHER; note = 2'-O-methyl-cytidine
  modified_base 18: mod_base = OTHER; note = 2'-O-methyl-cytidine
  modified_base 19: mod_base = OTHER; note = 2'-O-methyl-uridine
  modified_base 20: mod_base = OTHER; note = 2'-O-methyl-uridine with phosphorothioate linkage
  modified_base 21: mod_base = OTHER; note = 2'-O-methyl-uridine with phosphorothioate linkage
  modified_base 22: mod_base = OTHER; note = 2'-O-methyl-guanosine
tctcctgcaccccaggcctttg

SEQ ID NO: 796 - RNA, 22 nt, synthetic construct
  source 1..22: mol_type = other RNA
  modified_base 1: mod_base = OTHER; note = 2'-O-methyl-uridine with phosphorothioate linkage
  modified_base 2: mod_base = OTHER; note = 2'-fluoro-guanosine with phosphorothioate linkage
  modified_base 3: mod_base = OTHER; note = 2'-fluoro-cytidine
  modified_base 4: mod_base = OTHER; note = 2'-O-methyl-uridine
  modified_base 5: mod_base = OTHER; note = 2'-fluoro-uridine
  modified_base 6: mod_base = OTHER; note = 2'-O-methyl-guanosine
  modified_base 7: mod_base = OTHER; note = 2'-fluoro-guanosine
  modified_base 8: mod_base = OTHER; note = 2'-O-methyl-adenosine
  modified_base 9: mod_base = OTHER; note = 2'-O-methyl-adenosine
  modified_base 10: mod_base = OTHER; note = 2'-fluoro-cytidine
  modified_base 11: mod_base = OTHER; note = 2'-O-methyl-uridine
  modified_base 12: mod_base = OTHER; note = 2'-O-methyl-guanosine
  modified_base 13: mod_base = OTHER; note = 2'-O-methyl-guanosine
  modified_base 14: mod_base = OTHER; note = 2'-fluoro-guanosine
  modified_base 15: mod_base = OTHER; note = 2'-O-methyl-adenosine
  modified_base 16: mod_base = OTHER; note = 2'-fluoro-cytidine
  modified_base 17: mod_base = OTHER; note = 2'-O-methyl-cytidine
  modified_base 18: mod_base = OTHER; note = 2'-O-methyl-adenosine
  modified_base 19: mod_base = OTHER; note = 2'-O-methyl-cytidine
  modified_base 20: mod_base = OTHER; note = 2'-O-methyl-cytidine with phosphorothioate linkage
  modified_base 21: mod_base = OTHER; note = 2'-O-methyl-guanosine with phosphorothioate linkage
  modified_base 22: mod_base = OTHER; note = 2'-O-methyl-uridine
tgcttggaactgggaccaccgt

SEQ ID NO: 797 - RNA, 22 nt, synthetic construct
  source 1..22: mol_type = other RNA
  modified_base 1: mod_base = OTHER; note = 2'-O-methyl-uridine with phosphorothioate linkage
  modified_base 2: mod_base = OTHER; note = 2'-fluoro-adenosine with phosphorothioate linkage
  modified_base 3: mod_base = OTHER; note = 2'-fluoro-guanosine
  modified_base 4: mod_base = OTHER; note = 2'-O-methyl-cytidine
  modified_base 5: mod_base = OTHER; note = 2'-fluoro-adenosine
  modified_base 6: mod_base = OTHER; note = 2'-O-methyl-cytidine
  modified_base 7: mod_base = OTHER; note = 2'-fluoro-uridine
  modified_base 8: mod_base = OTHER; note = 2'-O-methyl-cytidine
  modified_base 9: mod_base = OTHER; note = 2'-O-methyl-cytidine
  modified_base 10: mod_base = OTHER; note = 2'-fluoro-uridine
  modified_base 11: mod_base = OTHER; note = 2'-O-methyl-guanosine
  modified_base 12: mod_base = OTHER; note = 2'-O-methyl-cytidine
  modified_base 13: mod_base = OTHER; note = 2'-O-methyl-adenosine
  modified_base 14: mod_base = OTHER; note = 2'-fluoro-cytidine
  modified_base 15: mod_base = OTHER; note = 2'-O-methyl-cytidine
  modified_base 16: mod_base = OTHER; note = 2'-fluoro-cytidine
  modified_base 17: mod_base = OTHER; note = 2'-O-methyl-cytidine
  modified_base 18: mod_base = OTHER; note = 2'-O-methyl-adenosine
  modified_base 19: mod_base = OTHER; note = 2'-O-methyl-guanosine
  modified_base 20: mod_base = OTHER; note = 2'-O-methyl-guanosine with phosphorothioate linkage
  modified_base 21: mod_base = OTHER; note = 2'-O-methyl-cytidine with phosphorothioate linkage
  modified_base 22: mod_base = OTHER; note = 2'-O-methyl-cytidine
tagcactcctgcaccccaggcc

SEQ ID NO: 798 - RNA, 22 nt, synthetic construct
  source 1..22: mol_type = other RNA
  modified_base 1: mod_base = OTHER; note = 2'-O-methyl-uridine with phosphorothioate linkage
  modified_base 2: mod_base = OTHER; note = 2'-fluoro-adenosine with phosphorothioate linkage
  modified_base 3: mod_base = OTHER; note = 2'-fluoro-guanosine
  modified_base 4: mod_base = OTHER; note = 2'-O-methyl-uridine
  modified_base 5: mod_base = OTHER; note = 2'-fluoro-uridine
  modified_base 6: mod_base = OTHER; note = 2'-O-methyl-uridine
  modified_base 7: mod_base = OTHER; note = 2'-fluoro-uridine
  modified_base 8: mod_base = OTHER; note = 2'-O-methyl-cytidine
  modified_base 9: mod_base = OTHER; note = 2'-O-methyl-uridine
  modified_base 10: mod_base = OTHER; note = 2'-fluoro-guanosine
  modified_base 11: mod_base = OTHER; note = 2'-O-methyl-guanosine
  modified_base 12: mod_base = OTHER; note = 2'-O-methyl-guanosine
  modified_base 13: mod_base = OTHER; note = 2'-O-methyl-guanosine
  modified_base 14: mod_base = OTHER; note = 2'-fluoro-uridine
  modified_base 15: mod_base = OTHER; note = 2'-O-methyl-cytidine
  modified_base 16: mod_base = OTHER; note = 2'-fluoro-cytidine
  modified_base 17: mod_base = OTHER; note = 2'-O-methyl-uridine
  modified_base 18: mod_base = OTHER; note = 2'-O-methyl-cytidine
  modified_base 19: mod_base = OTHER; note = 2'-O-methyl-uridine
  modified_base 20: mod_base = OTHER; note = 2'-O-methyl-guanosine with phosphorothioate linkage
  modified_base 21: mod_base = OTHER; note = 2'-O-methyl-adenosine with phosphorothioate linkage
  modified_base 22: mod_base = OTHER; note = 2'-O-methyl-uridine
tagttttctggggtcctctgat

SEQ ID NO: 799 - RNA, 22 nt, synthetic construct
  source 1..22: mol_type = other RNA
  modified_base 1: mod_base = OTHER; note = 2'-O-methyl-uridine with phosphorothioate linkage
  modified_base 2: mod_base = OTHER; note = 2'-fluoro-uridine with phosphorothioate linkage
  modified_base 3: mod_base = OTHER; note = 2'-fluoro-cytidine
  modified_base 4: mod_base = OTHER; note = 2'-O-methyl-cytidine
  modified_base 5: mod_base = OTHER; note = 2'-fluoro-cytidine
  modified_base 6: mod_base = OTHER; note = 2'-O-methyl-uridine
  modified_base 7: mod_base = OTHER; note = 2'-fluoro-uridine
  modified_base 8: mod_base = OTHER; note = 2'-O-methyl-cytidine
  modified_base 9: mod_base = OTHER; note = 2'-O-methyl-uridine
  modified_base 10: mod_base = OTHER; note = 2'-fluoro-guanosine
  modified_base 11: mod_base = OTHER; note = 2'-O-methyl-uridine
  modified_base 12: mod_base = OTHER; note = 2'-O-methyl-guanosine
  modified_base 13: mod_base = OTHER; note = 2'-O-methyl-uridine
  modified_base 14: mod_base = OTHER; note = 2'-fluoro-cytidine
  modified_base 15: mod_base = OTHER; note = 2'-O-methyl-uridine
  modified_base 16: mod_base = OTHER; note = 2'-fluoro-guanosine
  modified_base 17: mod_base = OTHER; note = 2'-O-methyl-adenosine
  modified_base 18: mod_base = OTHER; note = 2'-O-methyl-guanosine
  modified_base 19: mod_base = OTHER; note = 2'-O-methyl-cytidine
  modified_base 20: mod_base = OTHER; note = 2'-O-methyl-adenosine with phosphorothioate linkage
  modified_base 21: mod_base = OTHER; note = 2'-O-methyl-uridine with phosphorothioate linkage
  modified_base 22: mod_base = OTHER; note = 2'-O-methyl-cytidine
ttcccttctgtgtctgagcatc

SEQ ID NO: 800 - RNA, 22 nt, synthetic construct
  source 1..22: mol_type = other RNA
  modified_base 1: mod_base = OTHER; note = 2'-O-methyl-uridine with phosphorothioate linkage
  modified_base 2: mod_base = OTHER; note = 2'-fluoro-cytidine with phosphorothioate linkage
  modified_base 3: mod_base = OTHER; note = 2'-fluoro-adenosine
  modified_base 4: mod_base = OTHER; note = 2'-O-methyl-uridine
  modified_base 5: mod_base = OTHER; note = 2'-fluoro-guanosine
  modified_base 6: mod_base = OTHER; note = 2'-O-methyl-guanosine
  modified_base 7: mod_base = OTHER; note = 2'-fluoro-uridine
  modified_base 8: mod_base = OTHER; note = 2'-O-methyl-guanosine
  modified_base 9: mod_base = OTHER; note = 2'-O-methyl-uridine
  modified_base 10: mod_base = OTHER; note = 2'-fluoro-adenosine
  modified_base 11: mod_base = OTHER; note = 2'-O-methyl-adenosine
  modified_base 12: mod_base = OTHER; note = 2'-O-methyl-cytidine
  modified_base 13: mod_base = OTHER; note = 2'-O-methyl-adenosine
  modified_base 14: mod_base = OTHER; note = 2'-fluoro-cytidine
  modified_base 15: mod_base = OTHER; note = 2'-O-methyl-cytidine
  modified_base 16: mod_base = OTHER; note = 2'-fluoro-adenosine
  modified_base 17: mod_base = OTHER; note = 2'-O-methyl-adenosine
  modified_base 18: mod_base = OTHER; note = 2'-O-methyl-guanosine
  modified_base 19: mod_base = OTHER; note = 2'-O-methyl-guanosine
  modified_base 20: mod_base = OTHER; note = 2'-O-methyl-guanosine with phosphorothioate linkage
  modified_base 21: mod_base = OTHER; note = 2'-O-methyl-cytidine with phosphorothioate linkage
  modified_base 22: mod_base = OTHER; note = 2'-O-methyl-guanosine
tcatggtgtaacaccaagggcg

SEQ ID NO: 801 - RNA, 22 nt, synthetic construct
  source 1..22: mol_type = other RNA
  modified_base 1: mod_base = OTHER; note = 2'-O-methyl-uridine with phosphorothioate linkage
  modified_base 2: mod_base = OTHER; note = 2'-fluoro-guanosine with phosphorothioate linkage
  modified_base 3: mod_base = OTHER; note = 2'-fluoro-uridine
  modified_base 4: mod_base = OTHER; note = 2'-O-methyl-guanosine
  modified_base 5: mod_base = OTHER; note = 2'-fluoro-uridine
  modified_base 6: mod_base = OTHER; note = 2'-O-methyl-adenosine
  modified_base 7: mod_base = OTHER; note = 2'-fluoro-adenosine
  modified_base 8: mod_base = OTHER; note = 2'-O-methyl-cytidine
  modified_base 9: mod_base = OTHER; note = 2'-O-methyl-adenosine
  modified_base 10: mod_base = OTHER; note = 2'-fluoro-cytidine
  modified_base 11: mod_base = OTHER; note = 2'-O-methyl-cytidine
  modified_base 12: mod_base = OTHER; note = 2'-O-methyl-adenosine
  modified_base 13: mod_base = OTHER; note = 2'-O-methyl-adenosine
  modified_base 14: mod_base = OTHER; note = 2'-fluoro-guanosine
  modified_base 15: mod_base = OTHER; note = 2'-O-methyl-guanosine
  modified_base 16: mod_base = OTHER; note = 2'-fluoro-guanosine
  modified_base 17: mod_base = OTHER; note = 2'-O-methyl-cytidine
  modified_base 18: mod_base = OTHER; note = 2'-O-methyl-guanosine
  modified_base 19: mod_base = OTHER; note = 2'-O-methyl-adenosine
  modified_base 20: mod_base = OTHER; note = 2'-O-methyl-adenosine with phosphorothioate linkage
  modified_base 21: mod_base = OTHER; note = 2'-O-methyl-uridine with phosphorothioate linkage
  modified_base 22: mod_base = OTHER; note = 2'-O-methyl-cytidine
tgtgtaacaccaagggcgaatc

SEQ ID NO: 802 - RNA, 22 nt, synthetic construct
  source 1..22: mol_type = other RNA
  modified_base 1: mod_base = OTHER; note = 2'-O-methyl-uridine with phosphorothioate linkage
  modified_base 2: mod_base = OTHER; note = 2'-fluoro-guanosine with phosphorothioate linkage
  modified_base 3: mod_base = OTHER; note = 2'-fluoro-guanosine
  modified_base 4: mod_base = OTHER; note = 2'-O-methyl-adenosine
  modified_base 5: mod_base = OTHER; note = 2'-fluoro-cytidine
  modified_base 6: mod_base = OTHER; note = 2'-O-methyl-cytidine
  modified_base 7: mod_base = OTHER; note = 2'-fluoro-adenosine
  modified_base 8: mod_base = OTHER; note = 2'-O-methyl-cytidine
  modified_base 9: mod_base = OTHER; note = 2'-O-methyl-adenosine
  modified_base 10: mod_base = OTHER; note = 2'-fluoro-uridine
  modified_base 11: mod_base = OTHER; note = 2'-O-methyl-guanosine
  modified_base 12: mod_base = OTHER; note = 2'-O-methyl-guanosine
  modified_base 13: mod_base = OTHER; note = 2'-O-methyl-cytidine
  modified_base 14: mod_base = OTHER; note = 2'-fluoro-uridine
  modified_base 15: mod_base = OTHER; note = 2'-O-methyl-uridine
  modified_base 16: mod_base = OTHER; note = 2'-fluoro-uridine
  modified_base 17: mod_base = OTHER; note = 2'-O-methyl-guanosine
  modified_base 18: mod_base = OTHER; note = 2'-O-methyl-cytidine
  modified_base 19: mod_base = OTHER; note = 2'-O-methyl-uridine
  modified_base 20: mod_base = OTHER; note = 2'-O-methyl-cytidine with phosphorothioate linkage
  modified_base 21: mod_base = OTHER; note = 2'-O-methyl-adenosine with phosphorothioate linkage
  modified_base 22: mod_base = OTHER; note = 2'-O-methyl-guanosine
tggaccacatggctttgctcag

SEQ ID NO: 803 - RNA, 22 nt, synthetic construct
  source 1..22: mol_type = other RNA
  modified_base 1: mod_base = OTHER; note = 2'-O-methyl-uridine with phosphorothioate linkage
  modified_base 2: mod_base = OTHER; note = 2'-fluoro-guanosine with phosphorothioate linkage
  modified_base 3: mod_base = OTHER; note = 2'-fluoro-uridine
  modified_base 4: mod_base = OTHER; note = 2'-O-methyl-cytidine
  modified_base 5: mod_base = OTHER; note = 2'-fluoro-cytidine
  modified_base 6: mod_base = OTHER; note = 2'-O-methyl-uridine
  modified_base 7: mod_base = OTHER; note = 2'-fluoro-uridine
  modified_base 8: mod_base = OTHER; note = 2'-O-methyl-cytidine
  modified_base 9: mod_base = OTHER; note = 2'-O-methyl-cytidine
  modified_base 10: mod_base = OTHER; note = 2'-fluoro-uridine
  modified_base 11: mod_base = OTHER; note = 2'-O-methyl-guanosine
  modified_base 12: mod_base = OTHER; note = 2'-O-methyl-uridine
  modified_base 13: mod_base = OTHER; note = 2'-O-methyl-guanosine
  modified_base 14: mod_base = OTHER; note = 2'-fluoro-adenosine
  modified_base 15: mod_base = OTHER; note = 2'-O-methyl-cytidine
  modified_base 16: mod_base = OTHER; note = 2'-fluoro-adenosine
  modified_base 17: mod_base = OTHER; note = 2'-O-methyl-guanosine
  modified_base 18: mod_base = OTHER; note = 2'-O-methyl-uridine
  modified_base 19: mod_base = OTHER; note = 2'-O-methyl-guanosine
  modified_base 20: mod_base = OTHER; note = 2'-O-methyl-guanosine with phosphorothioate linkage
  modified_base 21: mod_base = OTHER; note = 2'-O-methyl-uridine with phosphorothioate linkage
  modified_base 22: mod_base = OTHER; note = 2'-O-methyl-guanosine
tgtccttcctgtgacagtggtg

SEQ ID NO: 804 - RNA, 22 nt, synthetic construct
  source 1..22: mol_type = other RNA
  modified_base 1: mod_base = OTHER; note = 2'-O-methyl-uridine with phosphorothioate linkage
  modified_base 2: mod_base = OTHER; note = 2'-fluoro-guanosine with phosphorothioate linkage
  modified_base 3: mod_base = OTHER; note = 2'-fluoro-uridine
  modified_base 4: mod_base = OTHER; note = 2'-O-methyl-uridine
  modified_base 5: mod_base = OTHER; note = 2'-fluoro-cytidine
  modified_base 6: mod_base = OTHER; note = 2'-O-methyl-cytidine
  modified_base 7: mod_base = OTHER; note = 2'-fluoro-uridine
  modified_base 8: mod_base = OTHER; note = 2'-O-methyl-guanosine
  modified_base 9: mod_base = OTHER; note = 2'-O-methyl-guanosine
  modified_base 10: mod_base = OTHER; note = 2'-fluoro-uridine
  modified_base 11: mod_base = OTHER; note = 2'-O-methyl-cytidine
  modified_base 12: mod_base = OTHER; note = 2'-O-methyl-adenosine
  modified_base 13: mod_base = OTHER; note = 2'-O-methyl-guanosine
  modified_base 14: mod_base = OTHER; note = 2'-fluoro-guanosine
  modified_base 15: mod_base = OTHER; note = 2'-O-methyl-cytidine
  modified_base 16: mod_base = OTHER; note = 2'-fluoro-cytidine
  modified_base 17: mod_base = OTHER; note = 2'-O-methyl-adenosine
  modified_base 18: mod_base = OTHER; note = 2'-O-methyl-cytidine
  modified_base 19: mod_base = OTHER; note = 2'-O-methyl-cytidine
  modified_base 20: mod_base = OTHER; note = 2'-O-methyl-adenosine with phosphorothioate linkage
  modified_base 21: mod_base = OTHER; note = 2'-O-methyl-uridine with phosphorothioate linkage
  modified_base 22: mod_base = OTHER; note = 2'-O-methyl-uridine
tgttcctggtcaggccaccatt

SEQ ID NO: 805 - RNA, 22 nt, synthetic construct
  source 1..22: mol_type = other RNA
  modified_base 1: mod_base = OTHER; note = 2'-O-methyl-uridine with phosphorothioate linkage
  modified_base 2: mod_base = OTHER; note = 2'-fluoro-adenosine with phosphorothioate linkage
  modified_base 3: mod_base = OTHER; note = 2'-fluoro-uridine
  modified_base 4: mod_base = OTHER; note = 2'-O-methyl-adenosine
  modified_base 5: mod_base = OTHER; note = 2'-fluoro-guanosine
  modified_base 6: mod_base = OTHER; note = 2'-O-methyl-adenosine
  modified_base 7: mod_base = OTHER; note = 2'-fluoro-uridine
  modified_base 8: mod_base = OTHER; note = 2'-O-methyl-guanosine
  modified_base 9: mod_base = OTHER; note = 2'-O-methyl-adenosine
  modified_base 10: mod_base = OTHER; note = 2'-fluoro-cytidine
  modified_base 11: mod_base = OTHER; note = 2'-O-methyl-cytidine
  modified_base 12: mod_base = OTHER; note = 2'-O-methyl-adenosine
  modified_base 13: mod_base = OTHER; note = 2'-O-methyl-adenosine
  modified_base 14: mod_base = OTHER; note = 2'-fluoro-guanosine
  modified_base 15: mod_base = OTHER; note = 2'-O-methyl-cytidine
  modified_base 16: mod_base = OTHER; note = 2'-fluoro-uridine
  modified_base 17: mod_base = OTHER; note = 2'-O-methyl-uridine
  modified_base 18: mod_base = OTHER; note = 2'-O-methyl-guanosine
  modified_base 19: mod_base = OTHER; note = 2'-O-methyl-guanosine
  modified_base 20: mod_base = OTHER; note = 2'-O-methyl-cytidine with phosphorothioate linkage
  modified_base 21: mod_base = OTHER; note = 2'-O-methyl-adenosine with phosphorothioate linkage
  modified_base 22: mod_base = OTHER; note = 2'-O-methyl-adenosine
tatagatgaccaagcttggcaa

SEQ ID NO: 806 - RNA, 22 nt, synthetic construct
  source 1..22: mol_type = other RNA
  modified_base 1: mod_base = OTHER; note = 2'-O-methyl-uridine with phosphorothioate linkage
  modified_base 2: mod_base = OTHER; note = 2'-fluoro-cytidine with phosphorothioate linkage
  modified_base 3: mod_base = OTHER; note = 2'-fluoro-guanosine
  modified_base 4: mod_base = OTHER; note = 2'-O-methyl-uridine
  modified_base 5: mod_base = OTHER; note = 2'-fluoro-guanosine
  modified_base 6: mod_base = OTHER; note = 2'-O-methyl-guanosine
  modified_base 7: mod_base = OTHER; note = 2'-fluoro-uridine
  modified_base 8: mod_base = OTHER; note = 2'-O-methyl-adenosine
  modified_base 9: mod_base = OTHER; note = 2'-O-methyl-guanosine
  modified_base 10: mod_base = OTHER; note = 2'-fluoro-cytidine
  modified_base 11: mod_base = OTHER; note = 2'-O-methyl-adenosine
  modified_base 12: mod_base = OTHER; note = 2'-O-methyl-cytidine
  modified_base 13: mod_base = OTHER; note = 2'-O-methyl-uridine
  modified_base 14: mod_base = OTHER; note = 2'-fluoro-cytidine
  modified_base 15: mod_base = OTHER; note = 2'-O-methyl-cytidine
  modified_base 16: mod_base = OTHER; note = 2'-fluoro-uridine
  modified_base 17: mod_base = OTHER; note = 2'-O-methyl-guanosine
  modified_base 18: mod_base = OTHER; note = 2'-O-methyl-cytidine
  modified_base 19: mod_base = OTHER; note = 2'-O-methyl-adenosine
  modified_base 20: mod_base = OTHER; note = 2'-O-methyl-cytidine with phosphorothioate linkage
  modified_base 21: mod_base = OTHER; note = 2'-O-methyl-cytidine with phosphorothioate linkage
  modified_base 22: mod_base = OTHER; note = 2'-O-methyl-cytidine
tcgtggtagcactcctgcaccc

SEQ ID NO: 807 - RNA, 22 nt, synthetic construct
  source 1..22: mol_type = other RNA
  modified_base 1: mod_base = OTHER; note = 2'-O-methyl-uridine with phosphorothioate linkage
  modified_base 2: mod_base = OTHER; note = 2'-fluoro-uridine with phosphorothioate linkage
  modified_base 3: mod_base = OTHER; note = 2'-fluoro-uridine
  modified_base 4: mod_base = OTHER; note = 2'-O-methyl-cytidine
  modified_base 5: mod_base = OTHER; note = 2'-fluoro-guanosine
  modified_base 6: mod_base = OTHER; note = 2'-O-methyl-guanosine
  modified_base 7: mod_base = OTHER; note = 2'-fluoro-adenosine
  modified_base 8: mod_base = OTHER; note = 2'-O-methyl-adenosine
  modified_base 9: mod_base = OTHER; note = 2'-O-methyl-guanosine
  modified_base 10: mod_base = OTHER; note = 2'-fluoro-guanosine
  modified_base 11: mod_base = OTHER; note = 2'-O-methyl-adenosine
  modified_base 12: mod_base = OTHER; note = 2'-O-methyl-guanosine
  modified_base 13: mod_base = OTHER; note = 2'-O-methyl-cytidine
  modified_base 14: mod_base = OTHER; note = 2'-fluoro-cytidine
  modified_base 15: mod_base = OTHER; note = 2'-O-methyl-uridine
  modified_base 16: mod_base = OTHER; note = 2'-fluoro-cytidine
  modified_base 17: mod_base = OTHER; note = 2'-O-methyl-uridine
  modified_base 18: mod_base = OTHER; note = 2'-O-methyl-adenosine
  modified_base 19: mod_base = OTHER; note = 2'-O-methyl-guanosine
  modified_base 20: mod_base = OTHER; note = 2'-O-methyl-guanosine with phosphorothioate linkage
  modified_base 21: mod_base = OTHER; note = 2'-O-methyl-cytidine with phosphorothioate linkage
  modified_base 22: mod_base = OTHER; note = 2'-O-methyl-uridine
tttcggaaggagcctctaggct

SEQ ID NO: 808 - RNA, 22 nt, synthetic construct
  source 1..22: mol_type = other RNA
  modified_base 1: mod_base = OTHER; note = 2'-O-methyl-uridine with phosphorothioate linkage
  modified_base 2: mod_base = OTHER; note = 2'-fluoro-cytidine with phosphorothioate linkage
  modified_base 3: mod_base = OTHER; note = 2'-fluoro-adenosine
  modified_base 4: mod_base = OTHER; note = 2'-O-methyl-cytidine
  modified_base 5: mod_base = OTHER; note = 2'-fluoro-adenosine
  modified_base 6: mod_base = OTHER; note = 2'-O-methyl-guanosine
  modified_base 7: mod_base = OTHER; note = 2'-fluoro-guanosine
  modified_base 8: mod_base = OTHER; note = 2'-O-methyl-guanosine
  modified_base 9: mod_base = OTHER; note = 2'-O-methyl-cytidine
  modified_base 10: mod_base = OTHER; note = 2'-fluoro-uridine
  modified_base 11: mod_base = OTHER; note = 2'-O-methyl-uridine
  modified_base 12: mod_base = OTHER; note = 2'-O-methyl-uridine
  modified_base 13: mod_base = OTHER; note = 2'-O-methyl-uridine
  modified_base 14: mod_base = OTHER; note = 2'-fluoro-cytidine
  modified_base 15: mod_base = OTHER; note = 2'-O-methyl-uridine
  modified_base 16: mod_base = OTHER; note = 2'-fluoro-cytidine
  modified_base 17: mod_base = OTHER; note = 2'-O-methyl-adenosine
  modified_base 18: mod_base = OTHER; note = 2'-O-methyl-guanosine
  modified_base 19: mod_base = OTHER; note = 2'-O-methyl-guanosine
  modified_base 20: mod_base = OTHER; note = 2'-O-methyl-uridine with phosphorothioate linkage
  modified_base 21: mod_base = OTHER; note = 2'-O-methyl-guanosine with phosphorothioate linkage
  modified_base 22: mod_base = OTHER; note = 2'-O-methyl-guanosine
tcacagggcttttctcaggtgg

SEQ ID NO: 809 - RNA, 22 nt, synthetic construct
  source 1..22: mol_type = other RNA
  modified_base 1: mod_base = OTHER; note = 2'-O-methyl-uridine with phosphorothioate linkage
  modified_base 2: mod_base = OTHER; note = 2'-fluoro-uridine with phosphorothioate linkage
  modified_base 3: mod_base = OTHER; note = 2'-fluoro-adenosine
  modified_base 4: mod_base = OTHER; note = 2'-O-methyl-uridine
  modified_base 5: mod_base = OTHER; note = 2'-fluoro-adenosine
  modified_base 6: mod_base = OTHER; note = 2'-O-methyl-adenosine
  modified_base 7: mod_base = OTHER; note = 2'-fluoro-cytidine
  modified_base 8: mod_base = OTHER; note = 2'-O-methyl-adenosine
  modified_base 9: mod_base = OTHER; note = 2'-O-methyl-cytidine
  modified_base 10: mod_base = OTHER; note = 2'-fluoro-cytidine
  modified_base 11: mod_base = OTHER; note = 2'-O-methyl-adenosine
  modified_base 12: mod_base = OTHER; note = 2'-O-methyl-adenosine
  modified_base 13: mod_base = OTHER; note = 2'-O-methyl-guanosine
  modified_base 14: mod_base = OTHER; note = 2'-fluoro-guanosine
  modified_base 15: mod_base = OTHER; note = 2'-O-methyl-guanosine
  modified_base 16: mod_base = OTHER; note = 2'-fluoro-guanosine
  modified_base 17: mod_base = OTHER; note = 2'-O-methyl-cytidine
  modified_base 18: mod_base = OTHER; note = 2'-O-methyl-uridine
  modified_base 19: mod_base = OTHER; note = 2'-O-methyl-guanosine
  modified_base 20: mod_base = OTHER; note = 2'-O-methyl-cytidine with phosphorothioate linkage
  modified_base 21: mod_base = OTHER; note = 2'-O-methyl-cytidine with phosphorothioate linkage
  modified_base 22: mod_base = OTHER; note = 2'-O-methyl-adenosine
ttataacaccaaggggctgcca

SEQ ID NO: 810 - RNA, 22 nt, synthetic construct
  source 1..22: mol_type = other RNA
  modified_base 1: mod_base = OTHER; note = 2'-O-methyl-uridine with phosphorothioate linkage
  modified_base 2: mod_base = OTHER; note = 2'-fluoro-adenosine with phosphorothioate linkage
  modified_base 3: mod_base = OTHER; note = 2'-fluoro-uridine
  modified_base 4: mod_base = OTHER; note = 2'-O-methyl-uridine
  modified_base 5: mod_base = OTHER; note = 2'-fluoro-uridine
  modified_base 6: mod_base = OTHER; note = 2'-O-methyl-guanosine
  modified_base 7: mod_base = OTHER; note = 2'-fluoro-guanosine
  modified_base 8: mod_base = OTHER; note = 2'-O-methyl-guanosine
  modified_base 9: mod_base = OTHER; note = 2'-O-methyl-uridine
  modified_base 10: mod_base = OTHER; note = 2'-fluoro-adenosine
  modified_base 11: mod_base = OTHER; note = 2'-O-methyl-guanosine
  modified_base 12: mod_base = OTHER; note = 2'-O-methyl-uridine
  modified_base 13: mod_base = OTHER; note = 2'-O-methyl-uridine
  modified_base 14: mod_base = OTHER; note = 2'-fluoro-uridine
  modified_base 15: mod_base = OTHER; note = 2'-O-methyl-uridine
  modified_base 16: mod_base = OTHER; note = 2'-fluoro-cytidine
  modified_base 17: mod_base = OTHER; note = 2'-O-methyl-uridine
  modified_base 18: mod_base = OTHER; note = 2'-O-methyl-guanosine
  modified_base 19: mod_base = OTHER; note = 2'-O-methyl-guanosine
  modified_base 20: mod_base = OTHER; note = 2'-O-methyl-guanosine with phosphorothioate linkage
  modified_base 21: mod_base = OTHER; note = 2'-O-methyl-guanosine with phosphorothioate linkage
  modified_base 22: mod_base = OTHER; note = 2'-O-methyl-uridine
tatttgggtagttttctggggt

SEQ ID NO: 811 - RNA, 22 nt, synthetic construct
  source 1..22: mol_type = other RNA
  modified_base 1: mod_base = OTHER; note = 2'-O-methyl-uridine with phosphorothioate linkage
  modified_base 2: mod_base = OTHER; note = 2'-fluoro-guanosine with phosphorothioate linkage
  modified_base 3: mod_base = OTHER; note = 2'-fluoro-guanosine
  modified_base 4: mod_base = OTHER; note = 2'-O-methyl-uridine
  modified_base 5: mod_base = OTHER; note = 2'-fluoro-guanosine
  modified_base 6: mod_base = OTHER; note = 2'-O-methyl-cytidine
  modified_base 7: mod_base = OTHER; note = 2'-fluoro-uridine
  modified_base 8: mod_base = OTHER; note = 2'-O-methyl-uridine
  modified_base 9: mod_base = OTHER; note = 2'-O-methyl-guanosine
  modified_base 10: mod_base = OTHER; note = 2'-fluoro-uridine
  modified_base 11: mod_base = OTHER; note = 2'-O-methyl-uridine
  modified_base 12: mod_base = OTHER; note = 2'-O-methyl-cytidine
  modified_base 13: mod_base = OTHER; note = 2'-O-methyl-guanosine
  modified_base 14: mod_base = OTHER; note = 2'-fluoro-guanosine
  modified_base 15: mod_base = OTHER; note = 2'-O-methyl-adenosine
  modified_base 16: mod_base = OTHER; note = 2'-fluoro-adenosine
  modified_base 17: mod_base = OTHER; note = 2'-O-methyl-guanosine
  modified_base 18: mod_base = OTHER; note = 2'-O-methyl-guanosine
  modified_base 19: mod_base = OTHER; note = 2'-O-methyl-adenosine
  modified_base 20: mod_base = OTHER; note = 2'-O-methyl-guanosine with phosphorothioate linkage
  modified_base 21: mod_base = OTHER; note = 2'-O-methyl-cytidine with phosphorothioate linkage
  modified_base 22: mod_base = OTHER; note = 2'-O-methyl-cytidine
tggtgcttgttcggaaggagcc

SEQ ID NO: 812 - RNA, 22 nt, synthetic construct
  source 1..22: mol_type = other RNA
  modified_base 1: mod_base = OTHER; note = 2'-O-methyl-uridine with phosphorothioate linkage
  modified_base 2: mod_base = OTHER; note = 2'-fluoro-cytidine with phosphorothioate linkage
  modified_base 3: mod_base = OTHER; note = 2'-fluoro-uridine
  modified_base 4: mod_base = OTHER; note = 2'-O-methyl-cytidine
  modified_base 5: mod_base = OTHER; note = 2'-fluoro-uridine
  modified_base 6: mod_base = OTHER; note = 2'-O-methyl-adenosine
  modified_base 7: mod_base = OTHER; note = 2'-fluoro-guanosine
  modified_base 8: mod_base = OTHER; note = 2'-O-methyl-guanosine
  modified_base 9: mod_base = OTHER; note = 2'-O-methyl-adenosine
  modified_base 10: mod_base = OTHER; note = 2'-fluoro-cytidine
  modified_base 11: mod_base = OTHER; note = 2'-O-methyl-adenosine
  modified_base 12: mod_base = OTHER; note = 2'-O-methyl-cytidine
  modified_base 13: mod_base = OTHER; note = 2'-O-methyl-cytidine
  modified_base 14: mod_base = OTHER; note = 2'-fluoro-uridine
  modified_base 15: mod_base = OTHER; note = 2'-O-methyl-guanosine
  modified_base 16: mod_base = OTHER; note = 2'-fluoro-adenosine
  modified_base 17: mod_base = OTHER; note = 2'-O-methyl-uridine
  modified_base 18: mod_base = OTHER; note = 2'-O-methyl-uridine
  modified_base 19: mod_base = OTHER; note = 2'-O-methyl-cytidine
  modified_base 20: mod_base = OTHER; note = 2'-O-methyl-uridine with phosphorothioate linkage
  modified_base 21: mod_base = OTHER; note = 2'-O-methyl-guanosine with phosphorothioate linkage
  modified_base 22: mod_base = OTHER; note = 2'-O-methyl-uridine
tctctaggacacctgattctgt

SEQ ID NO: 813 - RNA, 22 nt, synthetic construct
  source 1..22: mol_type = other RNA
  modified_base 1: mod_base = OTHER; note = 2'-O-methyl-uridine with phosphorothioate linkage
  modified_base 2: mod_base = OTHER; note = 2'-fluoro-guanosine with phosphorothioate linkage
  modified_base 3: mod_base = OTHER; note = 2'-fluoro-cytidine
  modified_base 4: mod_base = OTHER; note = 2'-O-methyl-cytidine
  modified_base 5: mod_base = OTHER; note = 2'-fluoro-adenosine
  modified_base 6: mod_base = OTHER; note = 2'-O-methyl-guanosine
  modified_base 7: mod_base = OTHER; note = 2'-fluoro-cytidine
  modified_base 8: mod_base = OTHER; note = 2'-O-methyl-adenosine
  modified_base 9: mod_base = OTHER; note = 2'-O-methyl-uridine
  modified_base 10: mod_base = OTHER; note = 2'-fluoro-uridine
  modified_base 11: mod_base = OTHER; note = 2'-O-methyl-uridine
  modified_base 12: mod_base = OTHER; note = 2'-O-methyl-guanosine
  modified_base 13: mod_base = OTHER; note = 2'-O-methyl-guanosine
  modified_base 14: mod_base = OTHER; note = 2'-fluoro-guanosine
  modified_base 15: mod_base = OTHER; note = 2'-O-methyl-uridine
  modified_base 16: mod_base = OTHER; note = 2'-fluoro-adenosine
  modified_base 17: mod_base = OTHER; note = 2'-O-methyl-guanosine
  modified_base 18: mod_base = OTHER; note = 2'-O-methyl-uridine
  modified_base 19: mod_base = OTHER; note = 2'-O-methyl-uridine
  modified_base 20: mod_base = OTHER; note = 2'-O-methyl-uridine with phosphorothioate linkage
  modified_base 21: mod_base = OTHER; note = 2'-O-methyl-uridine with phosphorothioate linkage
  modified_base 22: mod_base = OTHER; note = 2'-O-methyl-cytidine
tgccagcatttgggtagttttc

SEQ ID NO: 814 - RNA, 22 nt, synthetic construct
  source 1..22: mol_type = other RNA
  modified_base 1: mod_base = OTHER; note = 2'-O-methyl-uridine with phosphorothioate linkage
  modified_base 2: mod_base = OTHER; note = 2'-fluoro-adenosine with phosphorothioate linkage
  modified_base 3: mod_base = OTHER; note = 2'-fluoro-uridine
  modified_base 4: mod_base = OTHER; note = 2'-O-methyl-cytidine
  modified_base 5: mod_base = OTHER; note = 2'-fluoro-uridine
  modified_base 6: mod_base = OTHER; note = 2'-O-methyl-guanosine
  modified_base 7: mod_base = OTHER; note = 2'-fluoro-guanosine
  modified_base 8: mod_base = OTHER; note = 2'-O-methyl-adenosine
  modified_base 9: mod_base = OTHER; note = 2'-O-methyl-uridine
  modified_base 10: mod_base = OTHER; note = 2'-fluoro-uridine
  modified_base 11: mod_base = OTHER; note = 2'-O-methyl-cytidine
  modified_base 12: mod_base = OTHER; note = 2'-O-methyl-cytidine
  modified_base 13: mod_base = OTHER; note = 2'-O-methyl-uridine
  modified_base 14: mod_base = OTHER; note = 2'-fluoro-guanosine
  modified_base 15: mod_base = OTHER; note = 2'-O-methyl-cytidine
  modified_base 16: mod_base = OTHER; note = 2'-fluoro-adenosine
  modified_base 17: mod_base = OTHER; note = 2'-O-methyl-guanosine
  modified_base 18: mod_base = OTHER; note = 2'-O-methyl-uridine
  modified_base 19: mod_base = OTHER; note = 2'-O-methyl-adenosine
  modified_base 20: mod_base = OTHER; note = 2'-O-methyl-guanosine with phosphorothioate linkage
  modified_base 21: mod_base = OTHER; note = 2'-O-methyl-uridine with phosphorothioate linkage
  modified_base 22: mod_base = OTHER; note = 2'-O-methyl-uridine
tatctggattcctgcagtagtt

SEQ ID NO: 815 - RNA, 22 nt, synthetic construct
  source 1..22: mol_type = other RNA
  modified_base 1: mod_base = OTHER; note = 2'-O-methyl-uridine with phosphorothioate linkage
  modified_base 2: mod_base = OTHER; note = 2'-fluoro-guanosine with phosphorothioate linkage
  modified_base 3: mod_base = OTHER; note = 2'-fluoro-adenosine
  modified_base 4: mod_base = OTHER; note = 2'-O-methyl-adenosine
  modified_base 5: mod_base = OTHER; note = 2'-fluoro-guanosine
  modified_base 6: mod_base = OTHER; note = 2'-O-methyl-guanosine
  modified_base 7: mod_base = OTHER; note = 2'-fluoro-adenosine
  modified_base 8: mod_base = OTHER; note = 2'-O-methyl-guanosine
  modified_base 9: mod_base = OTHER; note = 2'-O-methyl-cytidine
  modified_base 10: mod_base = OTHER; note = 2'-fluoro-cytidine
  modified_base 11: mod_base = OTHER; note = 2'-O-methyl-uridine
  modified_base 12: mod_base = OTHER; note = 2'-O-methyl-cytidine
  modified_base 13: mod_base = OTHER; note = 2'-O-methyl-uridine
  modified_base 14: mod_base = OTHER; note = 2'-fluoro-adenosine
  modified_base 15: mod_base = OTHER; note = 2'-O-methyl-guanosine
  modified_base 16: mod_base = OTHER; note = 2'-fluoro-guanosine
  modified_base 17: mod_base = OTHER; note = 2'-O-methyl-cytidine
  modified_base 18: mod_base = OTHER; note = 2'-O-methyl-uridine
  modified_base 19: mod_base = OTHER; note = 2'-O-methyl-uridine
  modified_base 20: mod_base = OTHER; note = 2'-O-methyl-guanosine with phosphorothioate linkage
  modified_base 21: mod_base = OTHER; note = 2'-O-methyl-guanosine with phosphorothioate linkage
  modified_base 22: mod_base = OTHER; note = 2'-O-methyl-adenosine
tgaaggagcctctaggcttgga

SEQ ID NO: 816 - RNA, 22 nt, synthetic construct
  source 1..22: mol_type = other RNA
  modified_base 1: mod_base = OTHER; note = 2'-O-methyl-uridine with phosphorothioate linkage
  modified_base 2: mod_base = OTHER; note = 2'-fluoro-cytidine with phosphorothioate linkage
  modified_base 3: mod_base = OTHER; note = 2'-fluoro-adenosine
  modified_base 4: mod_base = OTHER; note = 2'-O-methyl-adenosine
  modified_base 5: mod_base = OTHER; note = 2'-fluoro-guanosine
  modified_base 6: mod_base = OTHER; note = 2'-O-methyl-adenosine
  modified_base 7: mod_base = OTHER; note = 2'-fluoro-uridine
  modified_base 8: mod_base = OTHER; note = 2'-O-methyl-uridine
  modified_base 9: mod_base = OTHER; note = 2'-O-methyl-guanosine
  modified_base 10: mod_base = OTHER; note = 2'-fluoro-adenosine
  modified_base 11: mod_base = OTHER; note = 2'-O-methyl-cytidine
  modified_base 12: mod_base = OTHER; note = 2'-O-methyl-adenosine
  modified_base 13: mod_base = OTHER; note = 2'-O-methyl-uridine
  modified_base 14: mod_base = OTHER; note = 2'-fluoro-guanosine
  modified_base 15: mod_base = OTHER; note = 2'-O-methyl-uridine
  modified_base 16: mod_base = OTHER; note = 2'-fluoro-cytidine
  modified_base 17: mod_base = OTHER; note = 2'-O-methyl-cytidine
  modified_base 18: mod_base = OTHER; note = 2'-O-methyl-uridine
  modified_base 19: mod_base = OTHER; note = 2'-O-methyl-uridine
  modified_base 20: mod_base = OTHER; note = 2'-O-methyl-cytidine with phosphorothioate linkage
  modified_base 21: mod_base = OTHER; note = 2'-O-methyl-cytidine with phosphorothioate linkage
  modified_base 22: mod_base = OTHER; note = 2'-O-methyl-uridine
tcaagattgacatgtccttcct

SEQ ID NO: 817 - RNA, 22 nt, synthetic construct
  source 1..22: mol_type = other RNA
  modified_base 1: mod_base = OTHER; note = 2'-O-methyl-uridine with phosphorothioate linkage
  modified_base 2: mod_base = OTHER; note = 2'-fluoro-uridine with phosphorothioate linkage
  modified_base 3: mod_base = OTHER; note = 2'-fluoro-uridine
  modified_base 4: mod_base = OTHER; note = 2'-O-methyl-cytidine
  modified_base 5: mod_base = OTHER; note = 2'-fluoro-cytidine
  modified_base 6: mod_base = OTHER; note = 2'-O-methyl-uridine
  modified_base 7: mod_base = OTHER; note = 2'-fluoro-guanosine
  modified_base 8: mod_base = OTHER; note = 2'-O-methyl-uridine
  modified_base 9: mod_base = OTHER; note = 2'-O-methyl-guanosine
  modified_base 10: mod_base = OTHER; note = 2'-fluoro-adenosine
  modified_base 11: mod_base = OTHER; note = 2'-O-methyl-cytidine
  modified_base 12: mod_base = OTHER; note = 2'-O-methyl-adenosine
  modified_base 13: mod_base = OTHER; note = 2'-O-methyl-guanosine
  modified_base 14: mod_base = OTHER; note = 2'-fluoro-uridine
  modified_base 15: mod_base = OTHER; note = 2'-O-methyl-guanosine
  modified_base 16: mod_base = OTHER; note = 2'-fluoro-guanosine
  modified_base 17: mod_base = OTHER; note = 2'-O-methyl-uridine
  modified_base 18: mod_base = OTHER; note = 2'-O-methyl-guanosine
  modified_base 19: mod_base = OTHER; note = 2'-O-methyl-guanosine
  modified_base 20: mod_base = OTHER; note = 2'-O-methyl-adenosine with phosphorothioate linkage
  modified_base 21: mod_base = OTHER; note = 2'-O-methyl-guanosine with phosphorothioate linkage
  modified_base 22: mod_base = OTHER; note = 2'-O-methyl-adenosine
tttcctgtgacagtggtggaga

SEQ ID NO: 818 - RNA, 22 nt, synthetic construct
  source 1..22: mol_type = other RNA
  modified_base 1: mod_base = OTHER; note = 2'-O-methyl-uridine with phosphorothioate linkage
  modified_base 2: mod_base = OTHER; note = 2'-fluoro-guanosine with phosphorothioate linkage
  modified_base 3: mod_base = OTHER; note = 2'-fluoro-uridine
  modified_base 4: mod_base = OTHER; note = 2'-O-methyl-cytidine
  modified_base 5: mod_base = OTHER; note = 2'-fluoro-adenosine
  modified_base 6: mod_base = OTHER; note = 2'-O-methyl-uridine
  modified_base 7: mod_base = OTHER; note = 2'-fluoro-guanosine
  modified_base 8: mod_base = OTHER; note = 2'-O-methyl-guanosine
  modified_base 9: mod_base = OTHER; note = 2'-O-methyl-adenosine
  modified_base 10: mod_base = OTHER; note = 2'-fluoro-uridine
  modified_base 11: mod_base = OTHER; note = 2'-O-methyl-guanosine
  modified_base 12: mod_base = OTHER; note = 2'-O-methyl-adenosine
  modified_base 13: mod_base = OTHER; note = 2'-O-methyl-cytidine
  modified_base 14: mod_base = OTHER; note = 2'-fluoro-cytidine
  modified_base 15: mod_base = OTHER; note = 2'-O-methyl-adenosine
  modified_base 16: mod_base = OTHER; note = 2'-fluoro-adenosine
  modified_base 17: mod_base = OTHER; note = 2'-O-methyl-guanosine
  modified_base 18: mod_base = OTHER; note = 2'-O-methyl-adenosine
  modified_base 19: mod_base = OTHER; note = 2'-O-methyl-uridine
  modified_base 20: mod_base = OTHER; note = 2'-O-methyl-uridine with phosphorothioate linkage
  modified_base 21: mod_base = OTHER; note = 2'-O-methyl-guanosine with phosphorothioate linkage
  modified_base 22: mod_base = OTHER; note = 2'-O-methyl-adenosine
tgtcatggatgaccaagattga

SEQ ID NO: 819 - RNA, 22 nt, synthetic construct
  source 1..22: mol_type = other RNA
  modified_base 1: mod_base = OTHER; note = 2'-O-methyl-uridine with phosphorothioate linkage
  modified_base 2: mod_base = OTHER; note = 2'-fluoro-cytidine with phosphorothioate linkage
  modified_base 3: mod_base = OTHER; note = 2'-fluoro-adenosine
  modified_base 4: mod_base = OTHER; note = 2'-O-methyl-adenosine
  modified_base 5: mod_base = OTHER; note = 2'-fluoro-uridine
  modified_base 6: mod_base = OTHER; note = 2'-O-methyl-guanosine
  modified_base 7: mod_base = OTHER; note = 2'-fluoro-cytidine
  modified_base 8: mod_base = OTHER; note = 2'-O-methyl-uridine
  modified_base 9: mod_base = OTHER; note = 2'-O-methyl-uridine
  modified_base 10: mod_base = OTHER; note = 2'-fluoro-cytidine
  modified_base 11: mod_base = OTHER; note = 2'-O-methyl-cytidine
  modified_base 12: mod_base = OTHER; note = 2'-O-methyl-adenosine
  modified_base 13: mod_base = OTHER; note = 2'-O-methyl-guanosine
  modified_base 14: mod_base = OTHER; note = 2'-fluoro-guanosine
  modified_base 15: mod_base = OTHER; note = 2'-O-methyl-adenosine
  modified_base 16: mod_base = OTHER; note = 2'-fluoro-cytidine
  modified_base 17: mod_base = OTHER; note = 2'-O-methyl-adenosine
  modified_base 18: mod_base = OTHER; note = 2'-O-methyl-uridine
  modified_base 19: mod_base = OTHER; note = 2'-O-methyl-uridine
  modified_base 20: mod_base = OTHER; note = 2'-O-methyl-uridine with phosphorothioate linkage
  modified_base 21: mod_base = OTHER; note = 2'-O-methyl-cytidine with phosphorothioate linkage
  modified_base 22: mod_base = OTHER; note = 2'-O-methyl-uridine
tcaatgcttccaggacatttct

SEQ ID NO: 820 - RNA, 22 nt, synthetic construct
  source 1..22: mol_type = other RNA
  modified_base 1: mod_base = OTHER; note = 2'-O-methyl-uridine with phosphorothioate linkage
  modified_base 2: mod_base = OTHER; note = 2'-fluoro-guanosine with phosphorothioate linkage
  modified_base 3: mod_base = OTHER; note = 2'-fluoro-guanosine
  modified_base 4: mod_base = OTHER; note = 2'-O-methyl-uridine
  modified_base 5: mod_base = OTHER; note = 2'-fluoro-cytidine
  modified_base 6: mod_base = OTHER; note = 2'-O-methyl-cytidine
  modified_base 7: mod_base = OTHER; note = 2'-fluoro-guanosine
  modified_base 8: mod_base = OTHER; note = 2'-O-methyl-adenosine
  modified_base 9: mod_base = OTHER; note = 2'-O-methyl-cytidine
  modified_base 10: mod_base = OTHER; note = 2'-fluoro-uridine
  modified_base 11: mod_base = OTHER; note = 2'-O-methyl-adenosine
  modified_base 12: mod_base = OTHER; note = 2'-O-methyl-uridine
  modified_base 13: mod_base = OTHER; note = 2'-O-methyl-guanosine
  modified_base 14: mod_base = OTHER; note = 2'-fluoro-cytidine
  modified_base 15: mod_base = OTHER; note = 2'-O-methyl-uridine
  modified_base 16: mod_base = OTHER; note = 2'-fluoro-guanosine
  modified_base 17: mod_base = OTHER; note = 2'-O-methyl-guanosine
  modified_base 18: mod_base = OTHER; note = 2'-O-methyl-uridine
  modified_base 19: mod_base = OTHER; note = 2'-O-methyl-guanosine
  modified_base 20: mod_base = OTHER; note = 2'-O-methyl-uridine with phosphorothioate linkage
  modified_base 21: mod_base = OTHER; note = 2'-O-methyl-guanosine with phosphorothioate linkage
  modified_base 22: mod_base = OTHER; note = 2'-O-methyl-guanosine
tggtccgactatgctggtgtgg

SEQ ID NO: 821 - RNA, 22 nt, synthetic construct
  source 1..22: mol_type = other RNA
  modified_base 1: mod_base = OTHER; note = 2'-O-methyl-uridine with phosphorothioate linkage
  modified_base 2: mod_base = OTHER; note = 2'-fluoro-cytidine with phosphorothioate linkage
  modified_base 3: mod_base = OTHER; note = 2'-fluoro-uridine
  modified_base 4: mod_base = OTHER; note = 2'-O-methyl-adenosine
  modified_base 5: mod_base = OTHER; note = 2'-fluoro-cytidine
  modified_base 6: mod_base = OTHER; note = 2'-O-methyl-adenosine
  modified_base 7: mod_base = OTHER; note = 2'-fluoro-adenosine
  modified_base 8: mod_base = OTHER; note = 2'-O-methyl-uridine
  modified_base 9: mod_base = OTHER; note = 2'-O-methyl-guanosine
  modified_base 10: mod_base = OTHER; note = 2'-fluoro-cytidine
  modified_base 11: mod_base = OTHER; note = 2'-O-methyl-uridine
  modified_base 12: mod_base = OTHER; note = 2'-O-methyl-uridine
  modified_base 13: mod_base = OTHER; note = 2'-O-methyl-cytidine
  modified_base 14: mod_base = OTHER; note = 2'-fluoro-cytidine
  modified_base 15: mod_base = OTHER; note = 2'-O-methyl-adenosine
  modified_base 16: mod_base = OTHER; note = 2'-fluoro-guanosine
  modified_base 17: mod_base = OTHER; note = 2'-O-methyl-guanosine
  modified_base 18: mod_base = OTHER; note = 2'-O-methyl-adenosine
  modified_base 19: mod_base = OTHER; note = 2'-O-methyl-cytidine
  modified_base 20: mod_base = OTHER; note = 2'-O-methyl-adenosine with phosphorothioate linkage
  modified_base 21: mod_base = OTHER; note = 2'-O-methyl-uridine with phosphorothioate linkage
  modified_base 22: mod_base = OTHER; note = 2'-O-methyl-uridine
tctacaatgcttccaggacatt

SEQ ID NO: 822 - RNA, 22 nt, synthetic construct
  source 1..22: mol_type = other RNA
  modified_base 1: mod_base = OTHER; note = 2'-O-methyl-uridine with phosphorothioate linkage
  modified_base 2: mod_base = OTHER; note = 2'-fluoro-guanosine with phosphorothioate linkage
  modified_base 3: mod_base = OTHER; note = 2'-fluoro-adenosine
  modified_base 4: mod_base = OTHER; note = 2'-O-methyl-uridine
  modified_base 5: mod_base = OTHER; note = 2'-fluoro-guanosine
  modified_base 6: mod_base = OTHER; note = 2'-O-methyl-cytidine
  modified_base 7: mod_base = OTHER; note = 2'-fluoro-cytidine
  modified_base 8: mod_base = OTHER; note = 2'-O-methyl-adenosine
  modified_base 9: mod_base = OTHER; note = 2'-O-methyl-guanosine
  modified_base 10: mod_base = OTHER; note = 2'-fluoro-uridine
  modified_base 11: mod_base = OTHER; note = 2'-O-methyl-guanosine
  modified_base 12: mod_base = OTHER; note = 2'-O-methyl-uridine
  modified_base 13: mod_base = OTHER; note = 2'-O-methyl-guanosine
  modified_base 14: mod_base = OTHER; note = 2'-fluoro-guanosine
  modified_base 15: mod_base = OTHER; note = 2'-O-methyl-uridine
  modified_base 16: mod_base = OTHER; note = 2'-fluoro-guanosine
  modified_base 17: mod_base = OTHER; note = 2'-O-methyl-uridine
  modified_base 18: mod_base = OTHER; note = 2'-O-methyl-cytidine
  modified_base 19: mod_base = OTHER; note = 2'-O-methyl-adenosine
  modified_base 20: mod_base = OTHER; note = 2'-O-methyl-uridine with phosphorothioate linkage
  modified_base 21: mod_base = OTHER; note = 2'-O-methyl-adenosine with phosphorothioate linkage
  modified_base 22: mod_base = OTHER; note = 2'-O-methyl-guanosine
tgatgccagtgtggtgtcatag

SEQ ID NO: 823 - RNA, 22 nt, synthetic construct
  source 1..22: mol_type = other RNA
  modified_base 1: mod_base = OTHER; note = 2'-O-methyl-uridine with phosphorothioate linkage
  modified_base 2: mod_base = OTHER; note = 2'-fluoro-uridine with phosphorothioate linkage
  modified_base 3: mod_base = OTHER; note = 2'-fluoro-cytidine
  modified_base 4: mod_base = OTHER; note = 2'-O-methyl-cytidine
  modified_base 5: mod_base = OTHER; note = 2'-fluoro-adenosine
  modified_base 6: mod_base = OTHER; note = 2'-O-methyl-uridine
  modified_base 7: mod_base = OTHER; note = 2'-fluoro-guanosine
  modified_base 8: mod_base = OTHER; note = 2'-O-methyl-guanosine
  modified_base 9: mod_base = OTHER; note = 2'-O-methyl-uridine
  modified_base 10: mod_base = OTHER; note = 2'-fluoro-adenosine
  modified_base 11: mod_base = OTHER; note = 2'-O-methyl-adenosine
  modified_base 12: mod_base = OTHER; note = 2'-O-methyl-adenosine
  modified_base 13: mod_base = OTHER; note = 2'-O-methyl-adenosine
  modified_base 14: mod_base = OTHER; note = 2'-fluoro-cytidine
  modified_base 15: mod_base = OTHER; note = 2'-O-methyl-adenosine
  modified_base 16: mod_base = OTHER; note = 2'-fluoro-cytidine
  modified_base 17: mod_base = OTHER; note = 2'-O-methyl-cytidine
  modified_base 18: mod_base = OTHER; note = 2'-O-methyl-adenosine
  modified_base 19: mod_base = OTHER; note = 2'-O-methyl-adenosine
  modified_base 20: mod_base = OTHER; note = 2'-O-methyl-guanosine with phosphorothioate linkage
  modified_base 21: mod_base = OTHER; note = 2'-O-methyl-guanosine with phosphorothioate linkage
  modified_base 22: mod_base = OTHER; note = 2'-O-methyl-guanosine
ttccatggtaaaacaccaaggg

SEQ ID NO: 824 - RNA, 22 nt, synthetic construct
  source 1..22: mol_type = other RNA
  modified_base 1: mod_base = OTHER; note = 2'-O-methyl-uridine with phosphorothioate linkage
  modified_base 2: mod_base = OTHER; note = 2'-fluoro-uridine with phosphorothioate linkage
  modified_base 3: mod_base = OTHER; note = 2'-fluoro-uridine
  modified_base 4: mod_base = OTHER; note = 2'-O-methyl-cytidine
  modified_base 5: mod_base = OTHER; note = 2'-fluoro-uridine
  modified_base 6: mod_base = OTHER; note = 2'-O-methyl-guanosine
  modified_base 7: mod_base = OTHER; note = 2'-fluoro-cytidine
  modified_base 8: mod_base = OTHER; note = 2'-O-methyl-adenosine
  modified_base 9: mod_base = OTHER; note = 2'-O-methyl-uridine
  modified_base 10: mod_base = OTHER; note = 2'-fluoro-cytidine
  modified_base 11: mod_base = OTHER; note = 2'-O-methyl-uridine
  modified_base 12: mod_base = OTHER; note = 2'-O-methyl-guanosine
  modified_base 13: mod_base = OTHER; note = 2'-O-methyl-adenosine
  modified_base 14: mod_base = OTHER; note = 2'-fluoro-guanosine
  modified_base 15: mod_base = OTHER; note = 2'-O-methyl-cytidine
  modified_base 16: mod_base = OTHER; note = 2'-fluoro-adenosine
  modified_base 17: mod_base = OTHER; note = 2'-O-methyl-uridine
  modified_base 18: mod_base = OTHER; note = 2'-O-methyl-cytidine
  modified_base 19: mod_base = OTHER; note = 2'-O-methyl-guanosine
  modified_base 20: mod_base = OTHER; note = 2'-O-methyl-uridine with phosphorothioate linkage
  modified_base 21: mod_base = OTHER; note = 2'-O-methyl-guanosine with phosphorothioate linkage
  modified_base 22: mod_base = OTHER; note = 2'-O-methyl-uridine
tttctgcatctgagcatcgtgt

SEQ ID NO: 825 - RNA, 22 nt, synthetic construct
  source 1..22: mol_type = other RNA
  modified_base 1: mod_base = OTHER; note = 2'-O-methyl-uridine with phosphorothioate linkage
  modified_base 2: mod_base = OTHER; note = 2'-fluoro-adenosine with phosphorothioate linkage
  modified_base 3: mod_base = OTHER; note = 2'-fluoro-uridine
  modified_base 4: mod_base = OTHER; note = 2'-O-methyl-cytidine
  modified_base 5: mod_base = OTHER; note = 2'-fluoro-cytidine
  modified_base 6: mod_base = OTHER; note = 2'-O-methyl-uridine
  modified_base 7: mod_base = OTHER; note = 2'-fluoro-guanosine
  modified_base 8: mod_base = OTHER; note = 2'-O-methyl-guanosine
  modified_base 9: mod_base = OTHER; note = 2'-O-methyl-adenosine
  modified_base 10: mod_base = OTHER; note = 2'-fluoro-cytidine
  modified_base 11: mod_base = OTHER; note = 2'-O-methyl-cytidine
  modified_base 12: mod_base = OTHER; note = 2'-O-methyl-adenosine
  modified_base 13: mod_base = OTHER; note = 2'-O-methyl-cytidine
  modified_base 14: mod_base = OTHER; note = 2'-fluoro-adenosine
  modified_base 15: mod_base = OTHER; note = 2'-O-methyl-uridine
  modified_base 16: mod_base = OTHER; note = 2'-fluoro-guanosine
  modified_base 17: mod_base = OTHER; note = 2'-O-methyl-guanosine
  modified_base 18: mod_base = OTHER; note = 2'-O-methyl-cytidine
  modified_base 19: mod_base = OTHER; note = 2'-O-methyl-uridine
  modified_base 20: mod_base = OTHER; note = 2'-O-methyl-uridine with phosphorothioate linkage
  modified_base 21: mod_base = OTHER; note = 2'-O-methyl-uridine with phosphorothioate linkage
  modified_base 22: mod_base = OTHER; note = 2'-O-methyl-guanosine
tatcctggaccacatggctttg

SEQ ID NO: 826 - RNA, 22 nt, synthetic construct
  source 1..22: mol_type = other RNA
  modified_base 1: mod_base = OTHER; note = 2'-O-methyl-uridine with phosphorothioate linkage
  modified_base 2: mod_base = OTHER; note = 2'-fluoro-cytidine with phosphorothioate linkage
  modified_base 3: mod_base = OTHER; note = 2'-fluoro-guanosine
  modified_base 4: mod_base = OTHER; note = 2'-O-methyl-cytidine
  modified_base 5: mod_base = OTHER; note = 2'-fluoro-guanosine
  modified_base 6: mod_base = OTHER; note = 2'-O-methyl-uridine
  modified_base 7: mod_base = OTHER; note = 2'-fluoro-cytidine
  modified_base 8: mod_base = OTHER; note = 2'-O-methyl-adenosine
  modified_base 9: mod_base = OTHER; note = 2'-O-methyl-guanosine
  modified_base 10: mod_base = OTHER; note = 2'-fluoro-guanosine
  modified_base 11: mod_base = OTHER; note = 2'-O-methyl-uridine
  modified_base 12: mod_base = OTHER; note = 2'-O-methyl-uridine
  modified_base 13: mod_base = OTHER; note = 2'-O-methyl-guanosine
  modified_base 14: mod_base = OTHER; note = 2'-fluoro-cytidine
  modified_base 15: mod_base = OTHER; note = 2'-O-methyl-adenosine
  modified_base 16: mod_base = OTHER; note = 2'-fluoro-guanosine
  modified_base 17: mod_base = OTHER; note = 2'-O-methyl-uridine
  modified_base 18: mod_base = OTHER; note = 2'-O-methyl-adenosine
  modified_base 19: mod_base = OTHER; note = 2'-O-methyl-cytidine
  modified_base 20: mod_base = OTHER; note = 2'-O-methyl-uridine with phosphorothioate linkage
  modified_base 21: mod_base = OTHER; note = 2'-O-methyl-cytidine with phosphorothioate linkage
  modified_base 22: mod_base = OTHER; note = 2'-O-methyl-cytidine
tcgcgtcaggttgcagtactcc

SEQ ID NO: 827 - RNA, 22 nt, synthetic construct
  source 1..22: mol_type = other RNA
  modified_base 1: mod_base = OTHER; note = 2'-O-methyl-uridine with phosphorothioate linkage
  modified_base 2: mod_base = OTHER; note = 2'-fluoro-cytidine with phosphorothioate linkage
  modified_base 3: mod_base = OTHER; note = 2'-fluoro-uridine
  modified_base 4: mod_base = OTHER; note = 2'-O-methyl-guanosine
  modified_base 5: mod_base = OTHER; note = 2'-fluoro-guanosine
  modified_base 6: mod_base = OTHER; note = 2'-O-methyl-adenosine
  modified_base 7: mod_base = OTHER; note = 2'-fluoro-uridine
  modified_base 8: mod_base = OTHER; note = 2'-O-methyl-uridine
  modified_base 9: mod_base = OTHER; note = 2'-O-methyl-cytidine
  modified_base 10: mod_base = OTHER; note = 2'-fluoro-cytidine
  modified_base 11: mod_base = OTHER; note = 2'-O-methyl-uridine
  modified_base 12: mod_base = OTHER; note = 2'-O-methyl-guanosine
  modified_base 13: mod_base = OTHER; note = 2'-O-methyl-cytidine
  modified_base 14: mod_base = OTHER; note = 2'-fluoro-adenosine
  modified_base 15: mod_base = OTHER; note = 2'-O-methyl-guanosine
  modified_base 16: mod_base = OTHER; note = 2'-fluoro-uridine
  modified_base 17: mod_base = OTHER; note = 2'-O-methyl-adenosine
  modified_base 18: mod_base = OTHER; note = 2'-O-methyl-guanosine
  modified_base 19: mod_base = OTHER; note = 2'-O-methyl-uridine
  modified_base 20: mod_base = OTHER; note = 2'-O-methyl-uridine with phosphorothioate linkage
  modified_base 21: mod_base = OTHER; note = 2'-O-methyl-cytidine with phosphorothioate linkage
  modified_base 22: mod_base = OTHER; note = 2'-O-methyl-cytidine
tctggattcctgcagtagttcc

SEQ ID NO: 828 - RNA, 22 nt, synthetic construct
  source 1..22: mol_type = other RNA
  modified_base 1: mod_base = OTHER; note = 2'-O-methyl-uridine with phosphorothioate linkage
  modified_base 2: mod_base = OTHER; note = 2'-fluoro-guanosine with phosphorothioate linkage
  modified_base 3: mod_base = OTHER; note = 2'-fluoro-cytidine
  modified_base 4: mod_base = OTHER; note = 2'-O-methyl-adenosine
  modified_base 5: mod_base = OTHER; note = 2'-fluoro-uridine
  modified_base 6: mod_base = OTHER; note = 2'-O-methyl-cytidine
  modified_base 7: mod_base = OTHER; note = 2'-fluoro-guanosine
  modified_base 8: mod_base = OTHER; note = 2'-O-methyl-cytidine
  modified_base 9: mod_base = OTHER; note = 2'-O-methyl-guanosine
  modified_base 10: mod_base = OTHER; note = 2'-fluoro-uridine
  modified_base 11: mod_base = OTHER; note = 2'-O-methyl-cytidine
  modified_base 12: mod_base = OTHER; note = 2'-O-methyl-adenosine
  modified_base 13: mod_base = OTHER; note = 2'-O-methyl-guanosine
  modified_base 14: mod_base = OTHER; note = 2'-fluoro-guanosine
  modified_base 15: mod_base = OTHER; note = 2'-O-methyl-uridine
  modified_base 16: mod_base = OTHER; note = 2'-fluoro-uridine
  modified_base 17: mod_base = OTHER; note = 2'-O-methyl-guanosine
  modified_base 18: mod_base = OTHER; note = 2'-O-methyl-cytidine
  modified_base 19: mod_base = OTHER; note = 2'-O-methyl-adenosine
  modified_base 20: mod_base = OTHER; note = 2'-O-methyl-guanosine with phosphorothioate linkage
  modified_base 21: mod_base = OTHER; note = 2'-O-methyl-uridine with phosphorothioate linkage
  modified_base 22: mod_base = OTHER; note = 2'-O-methyl-adenosine
tgcatcgcgtcaggttgcagta

SEQ ID NO: 829 - RNA, 22 nt, synthetic construct
  source 1..22: mol_type = other RNA
  modified_base 1: mod_base = OTHER; note = 2'-O-methyl-uridine with phosphorothioate linkage
  modified_base 2: mod_base = OTHER; note = 2'-fluoro-uridine with phosphorothioate linkage
  modified_base 3: mod_base = OTHER; note = 2'-fluoro-uridine
  modified_base 4: mod_base = OTHER; note = 2'-O-methyl-cytidine
  modified_base 5: mod_base = OTHER; note = 2'-fluoro-uridine
  modified_base 6: mod_base = OTHER; note = 2'-O-methyl-guanosine
  modified_base 7: mod_base = OTHER; note = 2'-fluoro-guanosine
  modified_base 8: mod_base = OTHER; note = 2'-O-methyl-guanosine
  modified_base 9: mod_base = OTHER; note = 2'-O-methyl-guanosine
  modified_base 10: mod_base = OTHER; note = 2'-fluoro-uridine
  modified_base 11: mod_base = OTHER; note = 2'-O-methyl-cytidine
  modified_base 12: mod_base = OTHER; note = 2'-O-methyl-cytidine
  modified_base 13: mod_base = OTHER; note = 2'-O-methyl-uridine
  modified_base 14: mod_base = OTHER; note = 2'-fluoro-cytidine
  modified_base 15: mod_base = OTHER; note = 2'-O-methyl-uridine
  modified_base 16: mod_base = OTHER; note = 2'-fluoro-guanosine
  modified_base 17: mod_base = OTHER; note = 2'-O-methyl-adenosine
  modified_base 18: mod_base = OTHER; note = 2'-O-methyl-uridine
  modified_base 19: mod_base = OTHER; note = 2'-O-methyl-guanosine
  modified_base 20: mod_base = OTHER; note = 2'-O-methyl-cytidine with phosphorothioate linkage
  modified_base 21: mod_base = OTHER; note = 2'-O-methyl-cytidine with phosphorothioate linkage
  modified_base 22: mod_base = OTHER; note = 2'-O-methyl-guanosine
tttctggggtcctctgatgccg

SEQ ID NO: 830 - RNA, 22 nt, synthetic construct
  source 1..22: mol_type = other RNA
  modified_base 1: mod_base = OTHER; note = 2'-O-methyl-uridine with phosphorothioate linkage
  modified_base 2: mod_base = OTHER; note = 2'-fluoro-guanosine with phosphorothioate linkage
  modified_base 3: mod_base = OTHER; note = 2'-fluoro-adenosine
  modified_base 4: mod_base = OTHER; note = 2'-O-methyl-cytidine
  modified_base 5: mod_base = OTHER; note = 2'-fluoro-adenosine
  modified_base 6: mod_base = OTHER; note = 2'-O-methyl-cytidine
  modified_base 7: mod_base = OTHER; note = 2'-fluoro-cytidine
  modified_base 8: mod_base = OTHER; note = 2'-O-methyl-uridine
  modified_base 9: mod_base = OTHER; note = 2'-O-methyl-guanosine
  modified_base 10: mod_base = OTHER; note = 2'-fluoro-adenosine
  modified_base 11: mod_base = OTHER; note = 2'-O-methyl-uridine
  modified_base 12: mod_base = OTHER; note = 2'-O-methyl-uridine
  modified_base 13: mod_base = OTHER; note = 2'-O-methyl-cytidine
  modified_base 14: mod_base = OTHER; note = 2'-fluoro-uridine
  modified_base 15: mod_base = OTHER; note = 2'-O-methyl-guanosine
  modified_base 16: mod_base = OTHER; note = 2'-fluoro-uridine
  modified_base 17: mod_base = OTHER; note = 2'-O-methyl-uridine
  modified_base 18: mod_base = OTHER; note = 2'-O-methyl-uridine
  modified_base 19: mod_base = OTHER; note = 2'-O-methyl-cytidine
  modified_base 20: mod_base = OTHER; note = 2'-O-methyl-uridine with phosphorothioate linkage
  modified_base 21: mod_base = OTHER; note = 2'-O-methyl-guanosine with phosphorothioate linkage
  modified_base 22: mod_base = OTHER; note = 2'-O-methyl-adenosine
tgacacctgattctgtttctga

SEQ ID NO: 831 - RNA, 22 nt, synthetic construct
  source 1..22: mol_type = other RNA
  modified_base 1: mod_base = OTHER; note = 2'-O-methyl-uridine with phosphorothioate linkage
  modified_base 2: mod_base = OTHER; note = 2'-fluoro-adenosine with phosphorothioate linkage
  modified_base 3: mod_base = OTHER; note = 2'-fluoro-cytidine
  modified_base 4: mod_base = OTHER; note = 2'-O-methyl-adenosine
  modified_base 5: mod_base = OTHER; note = 2'-fluoro-guanosine
  modified_base 6: mod_base = OTHER; note = 2'-O-methyl-uridine
  modified_base 7: mod_base = OTHER; note = 2'-fluoro-cytidine
  modified_base 8: mod_base = OTHER; note = 2'-O-methyl-cytidine
  modified_base 9: mod_base = OTHER; note = 2'-O-methyl-cytidine
  modified_base 10: mod_base = OTHER; note = 2'-fluoro-uridine
  modified_base 11: mod_base = OTHER; note = 2'-O-methyl-uridine
  modified_base 12: mod_base = OTHER; note = 2'-O-methyl-cytidine
  modified_base 13: mod_base = OTHER; note = 2'-O-methyl-uridine
  modified_base 14: mod_base = OTHER; note = 2'-fluoro-guanosine
  modified_base 15: mod_base = OTHER; note = 2'-O-methyl-uridine
  modified_base 16: mod_base = OTHER; note = 2'-fluoro-guanosine
  modified_base 17: mod_base = OTHER; note = 2'-O-methyl-uridine
  modified_base 18: mod_base = OTHER; note = 2'-O-methyl-cytidine
  modified_base 19: mod_base = OTHER; note = 2'-O-methyl-uridine
  modified_base 20: mod_base = OTHER; note = 2'-O-methyl-guanosine with phosphorothioate linkage
  modified_base 21: mod_base = OTHER; note = 2'-O-methyl-adenosine with phosphorothioate linkage
  modified_base 22: mod_base = OTHER; note = 2'-O-methyl-guanosine
tacagtcccttctgtgtctgag

SEQ ID NO: 832 - RNA, 22 nt, synthetic construct
  source 1..22: mol_type = other RNA
  modified_base 1: mod_base = OTHER; note = 2'-O-methyl-uridine with phosphorothioate linkage
  modified_base 2: mod_base = OTHER; note = 2'-fluoro-uridine with phosphorothioate linkage
  modified_base 3: mod_base = OTHER; note = 2'-fluoro-guanosine
  modified_base 4: mod_base = OTHER; note = 2'-O-methyl-uridine
  modified_base 5: mod_base = OTHER; note = 2'-fluoro-uridine
  modified_base 6: mod_base = OTHER; note = 2'-O-methyl-cytidine
  modified_base 7: mod_base = OTHER; note = 2'-fluoro-adenosine
  modified_base 8: mod_base = OTHER; note = 2'-O-methyl-guanosine
  modified_base 9: mod_base = OTHER; note = 2'-O-methyl-adenosine
  modified_base 10: mod_base = OTHER; note = 2'-fluoro-adenosine
  modified_base 11: mod_base = OTHER; note = 2'-O-methyl-guanosine
  modified_base 12: mod_base = OTHER; note = 2'-O-methyl-guanosine
  modified_base 13: mod_base = OTHER; note = 2'-O-methyl-adenosine
  modified_base 14: mod_base = OTHER; note = 2'-fluoro-guanosine
  modified_base 15: mod_base = OTHER; note = 2'-O-methyl-cytidine
  modified_base 16: mod_base = OTHER; note = 2'-fluoro-cytidine
  modified_base 17: mod_base = OTHER; note = 2'-O-methyl-uridine
  modified_base 18: mod_base = OTHER; note = 2'-O-methyl-cytidine
  modified_base 19: mod_base = OTHER; note = 2'-O-methyl-uridine
  modified_base 20: mod_base = OTHER; note = 2'-O-methyl-adenosine with phosphorothioate linkage
  modified_base 21: mod_base = OTHER; note = 2'-O-methyl-guanosine with phosphorothioate linkage
  modified_base 22: mod_base = OTHER; note = 2'-O-methyl-guanosine
ttgttcagaaggagcctctagg

SEQ ID NO: 833 - RNA, 22 nt, synthetic construct
  source 1..22: mol_type = other RNA
  modified_base 1: mod_base = OTHER; note = 2'-O-methyl-uridine with phosphorothioate linkage
  modified_base 2: mod_base = OTHER; note = 2'-fluoro-cytidine with phosphorothioate linkage
  modified_base 3: mod_base = OTHER; note = 2'-fluoro-adenosine
  modified_base 4: mod_base = OTHER; note = 2'-O-methyl-cytidine
  modified_base 5: mod_base = OTHER; note = 2'-fluoro-uridine
  modified_base 6: mod_base = OTHER; note = 2'-O-methyl-cytidine
  modified_base 7: mod_base = OTHER; note = 2'-fluoro-cytidine
  modified_base 8: mod_base = OTHER; note = 2'-O-methyl-uridine
  modified_base 9: mod_base = OTHER; note = 2'-O-methyl-guanosine
  modified_base 10: mod_base = OTHER; note = 2'-fluoro-cytidine
  modified_base 11: mod_base = OTHER; note = 2'-O-methyl-adenosine
  modified_base 12: mod_base = OTHER; note = 2'-O-methyl-cytidine
  modified_base 13: mod_base = OTHER; note = 2'-O-methyl-cytidine
  modified_base 14: mod_base = OTHER; note = 2'-fluoro-cytidine
  modified_base 15: mod_base = OTHER; note = 2'-O-methyl-cytidine
  modified_base 16: mod_base = OTHER; note = 2'-fluoro-adenosine
  modified_base 17: mod_base = OTHER; note = 2'-O-methyl-guanosine
  modified_base 18: mod_base = OTHER; note = 2'-O-methyl-guanosine
  modified_base 19: mod_base = OTHER; note = 2'-O-methyl-cytidine
  modified_base 20: mod_base = OTHER; note = 2'-O-methyl-cytidine with phosphorothioate linkage
  modified_base 21: mod_base = OTHER; note = 2'-O-methyl-uridine with phosphorothioate linkage
  modified_base 22: mod_base = OTHER; note = 2'-O-methyl-uridine
tcactcctgcaccccaggcctt

SEQ ID NO: 834 - RNA, 22 nt, synthetic construct
  source 1..22: mol_type = other RNA
  modified_base 1: mod_base = OTHER; note = 2'-O-methyl-uridine with phosphorothioate linkage
  modified_base 2: mod_base = OTHER; note = 2'-fluoro-adenosine with phosphorothioate linkage
  modified_base 3: mod_base = OTHER; note = 2'-fluoro-uridine
  modified_base 4: mod_base = OTHER; note = 2'-O-methyl-adenosine
  modified_base 5: mod_base = OTHER; note = 2'-fluoro-guanosine
  modified_base 6: mod_base = OTHER; note = 2'-O-methyl-adenosine
  modified_base 7: mod_base = OTHER; note = 2'-fluoro-uridine
  modified_base 8: mod_base = OTHER; note = 2'-O-methyl-guanosine
  modified_base 9: mod_base = OTHER; note = 2'-O-methyl-adenosine
  modified_base 10: mod_base = OTHER; note = 2'-fluoro-cytidine
  modified_base 11: mod_base = OTHER; note = 2'-O-methyl-cytidine
  modified_base 12: mod_base = OTHER; note = 2'-O-methyl-adenosine
  modified_base 13: mod_base = OTHER; note = 2'-O-methyl-adenosine
  modified_base 14: mod_base = OTHER; note = 2'-fluoro-guanosine
  modified_base 15: mod_base = OTHER; note = 2'-O-methyl-adenosine
  modified_base 16: mod_base = OTHER; note = 2'-fluoro-uridine
  modified_base 17: mod_base = OTHER; note = 2'-O-methyl-uridine
  modified_base 18: mod_base = OTHER; note = 2'-O-methyl-guanosine
  modified_base 19: mod_base = OTHER; note = 2'-O-methyl-adenosine
  modified_base 20: mod_base = OTHER; note = 2'-O-methyl-cytidine with phosphorothioate linkage
  modified_base 21: mod_base = OTHER; note = 2'-O-methyl-adenosine with phosphorothioate linkage
  modified_base 22: mod_base = OTHER; note = 2'-O-methyl-guanosine
tatagatgaccaagattgacag

SEQ ID NO: 835 - RNA, 22 nt, synthetic construct
  source 1..22: mol_type = other RNA
  modified_base 1: mod_base = OTHER; note = 2'-O-methyl-uridine with phosphorothioate linkage
  modified_base 2: mod_base = OTHER; note = 2'-fluoro-uridine with phosphorothioate linkage
  modified_base 3: mod_base = OTHER; note = 2'-fluoro-guanosine
  modified_base 4: mod_base = OTHER; note = 2'-O-methyl-uridine
  modified_base 5: mod_base = OTHER; note = 2'-fluoro-guanosine
  modified_base 6: mod_base = OTHER; note = 2'-O-methyl-adenosine
  modified_base 7: mod_base = OTHER; note = 2'-fluoro-cytidine
  modified_base 8: mod_base = OTHER; note = 2'-O-methyl-adenosine
  modified_base 9: mod_base = OTHER; note = 2'-O-methyl-guanosine
  modified_base 10: mod_base = OTHER; note = 2'-fluoro-uridine
  modified_base 11: mod_base = OTHER; note = 2'-O-methyl-guanosine
  modified_base 12: mod_base = OTHER; note = 2'-O-methyl-guanosine
  modified_base 13: mod_base = OTHER; note = 2'-O-methyl-uridine
  modified_base 14: mod_base = OTHER; note = 2'-fluoro-guanosine
  modified_base 15: mod_base = OTHER; note = 2'-O-methyl-guanosine
  modified_base 16: mod_base = OTHER; note = 2'-fluoro-adenosine
  modified_base 17: mod_base = OTHER; note = 2'-O-methyl-guanosine
  modified_base 18: mod_base = OTHER; note = 2'-O-methyl-adenosine
  modified_base 19: mod_base = OTHER; note = 2'-O-methyl-adenosine
  modified_base 20: mod_base = OTHER; note = 2'-O-methyl-uridine with phosphorothioate linkage
  modified_base 21: mod_base = OTHER; note = 2'-O-methyl-guanosine with phosphorothioate linkage
  modified_base 22: mod_base = OTHER; note = 2'-O-methyl-uridine
ttgtgacagtggtggagaatgt

SEQ ID NO: 836 - RNA, 22 nt, synthetic construct
  source 1..22: mol_type = other RNA
  modified_base 1: mod_base = OTHER; note = 2'-O-methyl-uridine with phosphorothioate linkage
  modified_base 2: mod_base = OTHER; note = 2'-fluoro-uridine with phosphorothioate linkage
  modified_base 3: mod_base = OTHER; note = 2'-fluoro-guanosine
  modified_base 4: mod_base = OTHER; note = 2'-O-methyl-uridine
  modified_base 5: mod_base = OTHER; note = 2'-fluoro-cytidine
  modified_base 6: mod_base = OTHER; note = 2'-O-methyl-adenosine
  modified_base 7: mod_base = OTHER; note = 2'-fluoro-guanosine
  modified_base 8: mod_base = OTHER; note = 2'-O-methyl-guanosine
  modified_base 9: mod_base = OTHER; note = 2'-O-methyl-uridine
  modified_base 10: mod_base = OTHER; note = 2'-fluoro-uridine
  modified_base 11: mod_base = OTHER; note = 2'-O-methyl-guanosine
  modified_base 12: mod_base = OTHER; note = 2'-O-methyl-cytidine
  modified_base 13: mod_base = OTHER; note = 2'-O-methyl-adenosine
  modified_base 14: mod_base = OTHER; note = 2'-fluoro-guanosine
  modified_base 15: mod_base = OTHER; note = 2'-O-methyl-uridine
  modified_base 16: mod_base = OTHER; note = 2'-fluoro-adenosine
  modified_base 17: mod_base = OTHER; note = 2'-O-methyl-cytidine
  modified_base 18: mod_base = OTHER; note = 2'-O-methyl-uridine
  modified_base 19: mod_base = OTHER; note = 2'-O-methyl-cytidine
  modified_base 20: mod_base = OTHER; note = 2'-O-methyl-cytidine with phosphorothioate linkage
  modified_base 21: mod_base = OTHER; note = 2'-O-methyl-cytidine with phosphorothioate linkage
  modified_base 22: mod_base = OTHER; note = 2'-O-methyl-adenosine
ttgtcaggttgcagtactccca

SEQ ID NO: 837 - RNA, 22 nt, synthetic construct
  source 1..22: mol_type = other RNA
  modified_base 1: mod_base = OTHER; note = 2'-O-methyl-uridine with phosphorothioate linkage
  modified_base 2: mod_base = OTHER; note = 2'-fluoro-guanosine with phosphorothioate linkage
  modified_base 3: mod_base = OTHER; note = 2'-fluoro-adenosine
  modified_base 4: mod_base = OTHER; note = 2'-O-methyl-uridine
  modified_base 5: mod_base = OTHER; note = 2'-fluoro-uridine
  modified_base 6: mod_base = OTHER; note = 2'-O-methyl-cytidine
  modified_base 7: mod_base = OTHER; note = 2'-fluoro-uridine
  modified_base 8: mod_base = OTHER; note = 2'-O-methyl-guanosine
  modified_base 9: mod_base = OTHER; note = 2'-O-methyl-uridine
  modified_base 10: mod_base = OTHER; note = 2'-fluoro-cytidine
  modified_base 11: mod_base = OTHER; note = 2'-O-methyl-adenosine
  modified_base 12: mod_base = OTHER; note = 2'-O-methyl-cytidine
  modified_base 13: mod_base = OTHER; note = 2'-O-methyl-uridine
  modified_base 14: mod_base = OTHER; note = 2'-fluoro-guanosine
  modified_base 15: mod_base = OTHER; note = 2'-O-methyl-guanosine
  modified_base 16: mod_base = OTHER; note = 2'-fluoro-adenosine
  modified_base 17: mod_base = OTHER; note = 2'-O-methyl-cytidine
  modified_base 18: mod_base = OTHER; note = 2'-O-methyl-adenosine
  modified_base 19: mod_base = OTHER; note = 2'-O-methyl-uridine
  modified_base 20: mod_base = OTHER; note = 2'-O-methyl-uridine with phosphorothioate linkage
  modified_base 21: mod_base = OTHER; note = 2'-O-methyl-guanosine with phosphorothioate linkage
  modified_base 22: mod_base = OTHER; note = 2'-O-methyl-uridine
tgattctgtcactggacattgt

SEQ ID NO: 838 - RNA, 22 nt, synthetic construct
  source 1..22: mol_type = other RNA
  modified_base 1: mod_base = OTHER; note = 2'-O-methyl-uridine with phosphorothioate linkage
  modified_base 2: mod_base = OTHER; note = 2'-fluoro-uridine with phosphorothioate linkage
  modified_base 3: mod_base = OTHER; note = 2'-fluoro-cytidine
  modified_base 4: mod_base = OTHER; note = 2'-O-methyl-cytidine
  modified_base 5: mod_base = OTHER; note = 2'-fluoro-uridine
  modified_base 6: mod_base = OTHER; note = 2'-O-methyl-guanosine
  modified_base 7: mod_base = OTHER; note = 2'-fluoro-guanosine
  modified_base 8: mod_base = OTHER; note = 2'-O-methyl-adenosine
  modified_base 9: mod_base = OTHER; note = 2'-O-methyl-cytidine
  modified_base 10: mod_base = OTHER; note = 2'-fluoro-cytidine
  modified_base 11: mod_base = OTHER; note = 2'-O-methyl-adenosine
  modified_base 12: mod_base = OTHER; note = 2'-O-methyl-cytidine
  modified_base 13: mod_base = OTHER; note = 2'-O-methyl-adenosine
  modified_base 14: mod_base = OTHER; note = 2'-fluoro-uridine
  modified_base 15: mod_base = OTHER; note = 2'-O-methyl-guanosine
  modified_base 16: mod_base = OTHER; note = 2'-fluoro-guanosine
  modified_base 17: mod_base = OTHER; note = 2'-O-methyl-cytidine
  modified_base 18: mod_base = OTHER; note = 2'-O-methyl-uridine
  modified_base 19: mod_base = OTHER; note = 2'-O-methyl-uridine
  modified_base 20: mod_base = OTHER; note = 2'-O-methyl-uridine with phosphorothioate linkage
  modified_base 21: mod_base = OTHER; note = 2'-O-methyl-guanosine with phosphorothioate linkage
  modified_base 22: mod_base = OTHER; note = 2'-O-methyl-cytidine
ttcctggaccacatggctttgc

SEQ ID NO: 839 - RNA, 22 nt, synthetic construct
  source 1..22: mol_type = other RNA
  modified_base 1: mod_base = OTHER; note = 2'-O-methyl-uridine with phosphorothioate linkage
  modified_base 2: mod_base = OTHER; note = 2'-fluoro-uridine with phosphorothioate linkage
  modified_base 3: mod_base = OTHER; note = 2'-fluoro-uridine
  modified_base 4: mod_base = OTHER; note = 2'-O-methyl-uridine
  modified_base 5: mod_base = OTHER; note = 2'-fluoro-adenosine
  modified_base 6: mod_base = OTHER; note = 2'-O-methyl-guanosine
  modified_base 7: mod_base = OTHER; note = 2'-fluoro-cytidine
  modified_base 8: mod_base = OTHER; note = 2'-O-methyl-adenosine
  modified_base 9: mod_base = OTHER; note = 2'-O-methyl-adenosine
  modified_base 10: mod_base = OTHER; note = 2'-fluoro-guanosine
  modified_base 11: mod_base = OTHER; note = 2'-O-methyl-guanosine
  modified_base 12: mod_base = OTHER; note = 2'-O-methyl-cytidine
  modified_base 13: mod_base = OTHER; note = 2'-O-methyl-adenosine
  modified_base 14: mod_base = OTHER; note = 2'-fluoro-adenosine
  modified_base 15: mod_base = OTHER; note = 2'-O-methyl-uridine
  modified_base 16: mod_base = OTHER; note = 2'-fluoro-adenosine
  modified_base 17: mod_base = OTHER; note = 2'-O-methyl-uridine
  modified_base 18: mod_base = OTHER; note = 2'-O-methyl-cytidine
  modified_base 19: mod_base = OTHER; note = 2'-O-methyl-uridine
  modified_base 20: mod_base = OTHER; note = 2'-O-methyl-guanosine with phosphorothioate linkage
  modified_base 21: mod_base = OTHER; note = 2'-O-methyl-cytidine with phosphorothioate linkage
  modified_base 22: mod_base = OTHER; note = 2'-O-methyl-uridine
ttttagcaaggcaatatctgct

SEQ ID NO: 840 - RNA, 22 nt, synthetic construct
  source 1..22: mol_type = other RNA
  modified_base 1: mod_base = OTHER; note = 2'-O-methyl-uridine with phosphorothioate linkage
  modified_base 2: mod_base = OTHER; note = 2'-fluoro-cytidine with phosphorothioate linkage
  modified_base 3: mod_base = OTHER; note = 2'-fluoro-cytidine
  modified_base 4: mod_base = OTHER; note = 2'-O-methyl-uridine
  modified_base 5: mod_base = OTHER; note = 2'-fluoro-guanosine
  modified_base 6: mod_base = OTHER; note = 2'-O-methyl-cytidine
  modified_base 7: mod_base = OTHER; note = 2'-fluoro-adenosine
  modified_base 8: mod_base = OTHER; note = 2'-O-methyl-cytidine
  modified_base 9: mod_base = OTHER; note = 2'-O-methyl-cytidine
  modified_base 10: mod_base = OTHER; note = 2'-fluoro-cytidine
  modified_base 11: mod_base = OTHER; note = 2'-O-methyl-cytidine
  modified_base 12: mod_base = OTHER; note = 2'-O-methyl-adenosine
  modified_base 13: mod_base = OTHER; note = 2'-O-methyl-guanosine
  modified_base 14: mod_base = OTHER; note = 2'-fluoro-guanosine
  modified_base 15: mod_base = OTHER; note = 2'-O-methyl-cytidine
  modified_base 16: mod_base = OTHER; note = 2'-fluoro-cytidine
  modified_base 17: mod_base = OTHER; note = 2'-O-methyl-uridine
  modified_base 18: mod_base = OTHER; note = 2'-O-methyl-uridine
  modified_base 19: mod_base = OTHER; note = 2'-O-methyl-uridine
  modified_base 20: mod_base = OTHER; note = 2'-O-methyl-guanosine with phosphorothioate linkage
  modified_base 21: mod_base = OTHER; note = 2'-O-methyl-cytidine with phosphorothioate linkage
  modified_base 22: mod_base = OTHER; note = 2'-O-methyl-uridine
tcctgcaccccaggcctttgct

SEQ ID NO: 841 - RNA, 22 nt, synthetic construct
  source 1..22: mol_type = other RNA
  modified_base 1: mod_base = OTHER; note = 2'-O-methyl-uridine with phosphorothioate linkage
  modified_base 2: mod_base = OTHER; note = 2'-fluoro-guanosine with phosphorothioate linkage
  modified_base 3: mod_base = OTHER; note = 2'-fluoro-adenosine
  modified_base 4: mod_base = OTHER; note = 2'-O-methyl-cytidine
  modified_base 5: mod_base = OTHER; note = 2'-fluoro-cytidine
  modified_base 6: mod_base = OTHER; note = 2'-O-methyl-adenosine
  modified_base 7: mod_base = OTHER; note = 2'-fluoro-cytidine
  modified_base 8: mod_base = OTHER; note = 2'-O-methyl-adenosine
  modified_base 9: mod_base = OTHER; note = 2'-O-methyl-guanosine
  modified_base 10: mod_base = OTHER; note = 2'-fluoro-uridine
  modified_base 11: mod_base = OTHER; note = 2'-O-methyl-cytidine
  modified_base 12: mod_base = OTHER; note = 2'-O-methyl-cytidine
  modified_base 13: mod_base = OTHER; note = 2'-O-methyl-cytidine
  modified_base 14: mod_base = OTHER; note = 2'-fluoro-uridine
  modified_base 15: mod_base = OTHER; note = 2'-O-methyl-uridine
  modified_base 16: mod_base = OTHER; note = 2'-fluoro-cytidine
  modified_base 17: mod_base = OTHER; note = 2'-O-methyl-uridine
  modified_base 18: mod_base = OTHER; note = 2'-O-methyl-guanosine
  modified_base 19: mod_base = OTHER; note = 2'-O-methyl-uridine
  modified_base 20: mod_base = OTHER; note = 2'-O-methyl-guanosine with phosphorothioate linkage
  modified_base 21: mod_base = OTHER; note = 2'-O-methyl-uridine with phosphorothioate linkage
  modified_base 22: mod_base = OTHER; note = 2'-O-methyl-cytidine
tgaccacagtcccttctgtgtc

SEQ ID NO: 842 - RNA, 22 nt, synthetic construct
  source 1..22: mol_type = other RNA
  modified_base 1: mod_base = OTHER; note = 2'-O-methyl-uridine with phosphorothioate linkage
  modified_base 2: mod_base = OTHER; note = 2'-fluoro-uridine with phosphorothioate linkage
  modified_base 3: mod_base = OTHER; note = 2'-fluoro-uridine
  modified_base 4: mod_base = OTHER; note = 2'-O-methyl-cytidine
  modified_base 5: mod_base = OTHER; note = 2'-fluoro-uridine
  modified_base 6: mod_base = OTHER; note = 2'-O-methyl-guanosine
  modified_base 7: mod_base = OTHER; note = 2'-fluoro-uridine
  modified_base 8: mod_base = OTHER; note = 2'-O-methyl-guanosine
  modified_base 9: mod_base = OTHER; note = 2'-O-methyl-uridine
  modified_base 10: mod_base = OTHER; note = 2'-fluoro-cytidine
  modified_base 11: mod_base = OTHER; note = 2'-O-methyl-uridine
  modified_base 12: mod_base = OTHER; note = 2'-O-methyl-guanosine
  modified_base 13: mod_base = OTHER; note = 2'-O-methyl-adenosine
  modified_base 14: mod_base = OTHER; note = 2'-fluoro-guanosine
  modified_base 15: mod_base = OTHER; note = 2'-O-methyl-cytidine
  modified_base 16: mod_base = OTHER; note = 2'-fluoro-adenosine
  modified_base 17: mod_base = OTHER; note = 2'-O-methyl-uridine
  modified_base 18: mod_base = OTHER; note = 2'-O-methyl-cytidine
  modified_base 19: mod_base = OTHER; note = 2'-O-methyl-guanosine
  modified_base 20: mod_base = OTHER; note = 2'-O-methyl-cytidine with phosphorothioate linkage
  modified_base 21: mod_base = OTHER; note = 2'-O-methyl-guanosine with phosphorothioate linkage
  modified_base 22: mod_base = OTHER; note = 2'-O-methyl-uridine
tttctgtgtctgagcatcgcgt

SEQ ID NO: 843 - RNA, 22 nt, synthetic construct
  source 1..22: mol_type = other RNA
  modified_base 1: mod_base = OTHER; note = 2'-O-methyl-uridine with phosphorothioate linkage
  modified_base 2: mod_base = OTHER; note = 2'-fluoro-uridine with phosphorothioate linkage
  modified_base 3: mod_base = OTHER; note = 2'-fluoro-cytidine
  modified_base 4: mod_base = OTHER; note = 2'-O-methyl-adenosine
  modified_base 5: mod_base = OTHER; note = 2'-fluoro-guanosine
  modified_base 6: mod_base = OTHER; note = 2'-O-methyl-guanosine
  modified_base 7: mod_base = OTHER; note = 2'-fluoro-uridine
  modified_base 8: mod_base = OTHER; note = 2'-O-methyl-uridine
  modified_base 9: mod_base = OTHER; note = 2'-O-methyl-guanosine
  modified_base 10: mod_base = OTHER; note = 2'-fluoro-cytidine
  modified_base 11: mod_base = OTHER; note = 2'-O-methyl-adenosine
  modified_base 12: mod_base = OTHER; note = 2'-O-methyl-guanosine
  modified_base 13: mod_base = OTHER; note = 2'-O-methyl-uridine
  modified_base 14: mod_base = OTHER; note = 2'-fluoro-adenosine
  modified_base 15: mod_base = OTHER; note = 2'-O-methyl-cytidine
  modified_base 16: mod_base = OTHER; note = 2'-fluoro-uridine
  modified_base 17: mod_base = OTHER; note = 2'-O-methyl-cytidine
  modified_base 18: mod_base = OTHER; note = 2'-O-methyl-cytidine
  modified_base 19: mod_base = OTHER; note = 2'-O-methyl-cytidine
  modified_base 20: mod_base = OTHER; note = 2'-O-methyl-adenosine with phosphorothioate linkage
  modified_base 21: mod_base = OTHER; note = 2'-O-methyl-cytidine with phosphorothioate linkage
  modified_base 22: mod_base = OTHER; note = 2'-O-methyl-cytidine
ttcaggttgcagtactcccacc

SEQ ID NO: 844 - RNA, 22 nt, synthetic construct
  source 1..22: mol_type = other RNA
  modified_base 1: mod_base = OTHER; note = 2'-O-methyl-uridine with phosphorothioate linkage
  modified_base 2: mod_base = OTHER; note = 2'-fluoro-guanosine with phosphorothioate linkage
  modified_base 3: mod_base = OTHER; note = 2'-fluoro-uridine
  modified_base 4: mod_base = OTHER; note = 2'-O-methyl-guanosine
  modified_base 5: mod_base = OTHER; note = 2'-fluoro-uridine
  modified_base 6: mod_base = OTHER; note = 2'-O-methyl-cytidine
  modified_base 7: mod_base = OTHER; note = 2'-fluoro-uridine
  modified_base 8: mod_base = OTHER; note = 2'-O-methyl-guanosine
  modified_base 9: mod_base = OTHER; note = 2'-O-methyl-adenosine
  modified_base 10: mod_base = OTHER; note = 2'-fluoro-guanosine
  modified_base 11: mod_base = OTHER; note = 2'-O-methyl-cytidine
  modified_base 12: mod_base = OTHER; note = 2'-O-methyl-adenosine
  modified_base 13: mod_base = OTHER; note = 2'-O-methyl-uridine
  modified_base 14: mod_base = OTHER; note = 2'-fluoro-cytidine
  modified_base 15: mod_base = OTHER; note = 2'-O-methyl-guanosine
  modified_base 16: mod_base = OTHER; note = 2'-fluoro-cytidine
  modified_base 17: mod_base = OTHER; note = 2'-O-methyl-guanosine
  modified_base 18: mod_base = OTHER; note = 2'-O-methyl-uridine
  modified_base 19: mod_base = OTHER; note = 2'-O-methyl-cytidine
  modified_base 20: mod_base = OTHER; note = 2'-O-methyl-adenosine with phosphorothioate linkage
  modified_base 21: mod_base = OTHER; note = 2'-O-methyl-guanosine with phosphorothioate linkage
  modified_base 22: mod_base = OTHER; note = 2'-O-methyl-guanosine
tgtgtctgagcatcgcgtcagg

SEQ ID NO: 845 - RNA, 22 nt, synthetic construct
  source 1..22: mol_type = other RNA
  modified_base 1: mod_base = OTHER; note = 2'-O-methyl-uridine with phosphorothioate linkage
  modified_base 2: mod_base = OTHER; note = 2'-fluoro-uridine with phosphorothioate linkage
  modified_base 3: mod_base = OTHER; note = 2'-fluoro-guanosine
  modified_base 4: mod_base = OTHER; note = 2'-O-methyl-guanosine
  modified_base 5: mod_base = OTHER; note = 2'-fluoro-uridine
  modified_base 6: mod_base = OTHER; note = 2'-O-methyl-adenosine
  modified_base 7: mod_base = OTHER; note = 2'-fluoro-adenosine
  modified_base 8: mod_base = OTHER; note = 2'-O-methyl-adenosine
  modified_base 9: mod_base = OTHER; note = 2'-O-methyl-adenosine
  modified_base 10: mod_base = OTHER; note = 2'-fluoro-cytidine
  modified_base 11: mod_base = OTHER; note = 2'-O-methyl-adenosine
  modified_base 12: mod_base = OTHER; note = 2'-O-methyl-cytidine
  modified_base 13: mod_base = OTHER; note = 2'-O-methyl-cytidine
  modified_base 14: mod_base = OTHER; note = 2'-fluoro-adenosine
  modified_base 15: mod_base = OTHER; note = 2'-O-methyl-adenosine
  modified_base 16: mod_base = OTHER; note = 2'-fluoro-guanosine
  modified_base 17: mod_base = OTHER; note = 2'-O-methyl-guanosine
  modified_base 18: mod_base = OTHER; note = 2'-O-methyl-guanosine
  modified_base 19: mod_base = OTHER; note = 2'-O-methyl-cytidine
  modified_base 20: mod_base = OTHER; note = 2'-O-methyl-cytidine with phosphorothioate linkage
  modified_base 21: mod_base = OTHER; note = 2'-O-methyl-uridine with phosphorothioate linkage
  modified_base 22: mod_base = OTHER; note = 2'-O-methyl-guanosine
ttggtaaaacaccaagggcctg

SEQ ID NO: 846 - RNA, 20 nt, synthetic construct
  source 1..20: mol_type = other RNA
  modified_base 1: mod_base = OTHER; note = 2'-O-methyl-uridine with phosphorothioate linkage
  modified_base 2: mod_base = OTHER; note = 2'-O-methyl-guanosine with phosphorothioate linkage
  modified_base 3: mod_base = OTHER; note = 2'-O-methyl-guanosine
  modified_base 4: mod_base = OTHER; note = 2'-O-methyl-uridine
  modified_base 5: mod_base = OTHER; note = 2'-O-methyl-cytidine
  modified_base 6: mod_base = OTHER; note = 2'-fluoro-adenosine
  modified_base 7: mod_base = OTHER; note = 2'-O-methyl-uridine
  modified_base 8: mod_base = OTHER; note = 2'-fluoro-cytidine
  modified_base 9: mod_base = OTHER; note = 2'-fluoro-uridine
  modified_base 10: mod_base = OTHER; note = 2'-fluoro-adenosine
  modified_base 11: mod_base = OTHER; note = 2'-fluoro-uridine
  modified_base 12: mod_base = OTHER; note = 2'-O-methyl-guanosine
  modified_base 13: mod_base = OTHER; note = 2'-O-methyl-adenosine
  modified_base 14: mod_base = OTHER; note = 2'-O-methyl-cytidine
  modified_base 15: mod_base = OTHER; note = 2'-O-methyl-adenosine
  modified_base 16: mod_base = OTHER; note = 2'-O-methyl-cytidine
  modified_base 17: mod_base = OTHER; note = 2'-O-methyl-cytidine
  modified_base 18: mod_base = OTHER; note = 2'-O-methyl-adenosine with phosphorothioate linkage
  modified_base 19: mod_base = OTHER; note = 2'-O-methyl-cytidine with phosphorothioate linkage
  modified_base 20: mod_base = OTHER; note = 2'-O-methyl-adenosine
  modified_base 20: mod_base = OTHER; note = Nucleotide conjugated to 3 iterations of (2R,3R,4R,5S)-5-(3-(5-(((2R,3R,4R,5R,6R)- 3-acetamido-4,5-dihydroxy-6-(hydroxymethyl)tetrahydro-2H-py ran-2-yl)oxy) pentanamido)propyl)-2-((hydroxyl)methyl)-4-methoxytetrahydr ofuran-3-oxyl
tggtcatctatgacaccaca

SEQ ID NO: 847 - RNA, 20 nt, synthetic construct
  source 1..20: mol_type = other RNA
  modified_base 1: mod_base = OTHER; note = 2'-O-methyl-adenosine with phosphorothioate linkage
  modified_base 2: mod_base = OTHER; note = 2'-O-methyl-guanosine with phosphorothioate linkage
  modified_base 3: mod_base = OTHER; note = 2'-O-methyl-guanosine
  modified_base 4: mod_base = OTHER; note = 2'-O-methyl-cytidine
  modified_base 5: mod_base = OTHER; note = 2'-O-methyl-uridine
  modified_base 6: mod_base = OTHER; note = 2'-fluoro-cytidine
  modified_base 7: mod_base = OTHER; note = 2'-O-methyl-adenosine
  modified_base 8: mod_base = OTHER; note = 2'-fluoro-uridine
  modified_base 9: mod_base = OTHER; note = 2'-fluoro-uridine
  modified_base 10: mod_base = OTHER; note = 2'-fluoro-cytidine
  modified_base 11: mod_base = OTHER; note = 2'-fluoro-uridine
  modified_base 12: mod_base = OTHER; note = 2'-O-methyl-cytidine
  modified_base 13: mod_base = OTHER; note = 2'-O-methyl-cytidine
  modified_base 14: mod_base = OTHER; note = 2'-O-methyl-adenosine
  modified_base 15: mod_base = OTHER; note = 2'-O-methyl-cytidine
  modified_base 16: mod_base = OTHER; note = 2'-O-methyl-cytidine
  modified_base 17: mod_base = OTHER; note = 2'-O-methyl-adenosine
  modified_base 18: mod_base = OTHER; note = 2'-O-methyl-cytidine with phosphorothioate linkage
  modified_base 19: mod_base = OTHER; note = 2'-O-methyl-uridine with phosphorothioate linkage
  modified_base 20: mod_base = OTHER; note = 2'-O-methyl-adenosine
  modified_base 20: mod_base = OTHER; note = Nucleotide conjugated to 3 iterations of (2R,3R,4R,5S)-5-(3-(5-(((2R,3R,4R,5R,6R)- 3-acetamido-4,5-dihydroxy-6-(hydroxymethyl)tetrahydro-2H-py ran-2-yl)oxy) pentanamido)propyl)-2-((hydroxyl)methyl)-4-methoxytetrahydr ofuran-3-oxyl
aggctcattctccaccacta

SEQ ID NO: 848 - RNA, 20 nt, synthetic construct
  source 1..20: mol_type = other RNA
  modified_base 1: mod_base = OTHER; note = 2'-O-methyl-adenosine with phosphorothioate linkage
  modified_base 2: mod_base = OTHER; note = 2'-O-methyl-uridine with phosphorothioate linkage
  modified_base 3: mod_base = OTHER; note = 2'-O-methyl-guanosine
  modified_base 4: mod_base = OTHER; note = 2'-O-methyl-guanosine
  modified_base 5: mod_base = OTHER; note = 2'-O-methyl-adenosine
  modified_base 6: mod_base = OTHER; note = 2'-fluoro-cytidine
  modified_base 7: mod_base = OTHER; note = 2'-O-methyl-adenosine
  modified_base 8: mod_base = OTHER; note = 2'-fluoro-guanosine
  modified_base 9: mod_base = OTHER; note = 2'-fluoro-adenosine
  modified_base 10: mod_base = OTHER; note = 2'-fluoro-guanosine
  modified_base 11: mod_base = OTHER; note = 2'-fluoro-uridine
  modified_base 12: mod_base = OTHER; note = 2'-O-methyl-uridine
  modified_base 13: mod_base = OTHER; note = 2'-O-methyl-adenosine
  modified_base 14: mod_base = OTHER; note = 2'-O-methyl-uridine
  modified_base 15: mod_base = OTHER; note = 2'-O-methyl-cytidine
  modified_base 16: mod_base = OTHER; note = 2'-O-methyl-guanosine
  modified_base 17: mod_base = OTHER; note = 2'-O-methyl-adenosine
  modified_base 18: mod_base = OTHER; note = 2'-O-methyl-guanosine with phosphorothioate linkage
  modified_base 19: mod_base = OTHER; note = 2'-O-methyl-guanosine with phosphorothioate linkage
  modified_base 20: mod_base = OTHER; note = 2'-O-methyl-adenosine
  modified_base 20: mod_base = OTHER; note = Nucleotide conjugated to 3 iterations of (2R,3R,4R,5S)-5-(3-(5-(((2R,3R,4R,5R,6R)- 3-acetamido-4,5-dihydroxy-6-(hydroxymethyl)tetrahydro-2H-py ran-2-yl)oxy) pentanamido)propyl)-2-((hydroxyl)methyl)-4-methoxytetrahydr ofuran-3-oxyl
atggacagagttatcgagga

SEQ ID NO: 849 - RNA, 20 nt, synthetic construct
  source 1..20: mol_type = other RNA
  modified_base 1: mod_base = OTHER; note = 2'-O-methyl-uridine with phosphorothioate linkage
  modified_base 2: mod_base = OTHER; note = 2'-O-methyl-guanosine with phosphorothioate linkage
  modified_base 3: mod_base = OTHER; note = 2'-O-methyl-cytidine
  modified_base 4: mod_base = OTHER; note = 2'-O-methyl-cytidine
  modified_base 5: mod_base = OTHER; note = 2'-O-methyl-adenosine
  modified_base 6: mod_base = OTHER; note = 2'-fluoro-adenosine
  modified_base 7: mod_base = OTHER; note = 2'-O-methyl-guanosine
  modified_base 8: mod_base = OTHER; note = 2'-fluoro-cytidine
  modified_base 9: mod_base = OTHER; note = 2'-fluoro-uridine
  modified_base 10: mod_base = OTHER; note = 2'-fluoro-uridine
  modified_base 11: mod_base = OTHER; note = 2'-fluoro-guanosine
  modified_base 12: mod_base = OTHER; note = 2'-O-methyl-guanosine
  modified_base 13: mod_base = OTHER; note = 2'-O-methyl-uridine
  modified_base 14: mod_base = OTHER; note = 2'-O-methyl-cytidine
  modified_base 15: mod_base = OTHER; note = 2'-O-methyl-adenosine
  modified_base 16: mod_base = OTHER; note = 2'-O-methyl-uridine
  modified_base 17: mod_base = OTHER; note = 2'-O-methyl-cytidine
  modified_base 18: mod_base = OTHER; note = 2'-O-methyl-uridine with phosphorothioate linkage
  modified_base 19: mod_base = OTHER; note = 2'-O-methyl-adenosine with phosphorothioate linkage
  modified_base 20: mod_base = OTHER; note = 2'-O-methyl-adenosine
  modified_base 20: mod_base = OTHER; note = Nucleotide conjugated to 3 iterations of (2R,3R,4R,5S)-5-(3-(5-(((2R,3R,4R,5R,6R)- 3-acetamido-4,5-dihydroxy-6-(hydroxymethyl)tetrahydro-2H-py ran-2-yl)oxy) pentanamido)propyl)-2-((hydroxyl)methyl)-4-methoxytetrahydr ofuran-3-oxyl
tgccaagcttggtcatctaa

SEQ ID NO: 850 - RNA, 20 nt, synthetic construct
  source 1..20: mol_type = other RNA
  modified_base 1: mod_base = OTHER; note = 2'-O-methyl-uridine with phosphorothioate linkage
  modified_base 2: mod_base = OTHER; note = 2'-O-methyl-guanosine with phosphorothioate linkage
  modified_base 3: mod_base = OTHER; note = 2'-O-methyl-cytidine
  modified_base 4: mod_base = OTHER; note = 2'-O-methyl-adenosine
  modified_base 5: mod_base = OTHER; note = 2'-O-methyl-adenosine
  modified_base 6: mod_base = OTHER; note = 2'-fluoro-cytidine
  modified_base 7: mod_base = OTHER; note = 2'-O-methyl-cytidine
  modified_base 8: mod_base = OTHER; note = 2'-fluoro-uridine
  modified_base 9: mod_base = OTHER; note = 2'-fluoro-guanosine
  modified_base 10: mod_base = OTHER; note = 2'-fluoro-adenosine
  modified_base 11: mod_base = OTHER; note = 2'-fluoro-cytidine
  modified_base 12: mod_base = OTHER; note = 2'-O-methyl-adenosine
  modified_base 13: mod_base = OTHER; note = 2'-O-methyl-cytidine
  modified_base 14: mod_base = OTHER; note = 2'-O-methyl-adenosine
  modified_base 15: mod_base = OTHER; note = 2'-O-methyl-adenosine
  modified_base 16: mod_base = OTHER; note = 2'-O-methyl-uridine
  modified_base 17: mod_base = OTHER; note = 2'-O-methyl-guanosine
  modified_base 18: mod_base = OTHER; note = 2'-O-methyl-cytidine with phosphorothioate linkage
  modified_base 19: mod_base = OTHER; note = 2'-O-methyl-uridine with phosphorothioate linkage
  modified_base 20: mod_base = OTHER; note = 2'-O-methyl-adenosine
  modified_base 20: mod_base = OTHER; note = Nucleotide conjugated to 3 iterations of (2R,3R,4R,5S)-5-(3-(5-(((2R,3R,4R,5R,6R)- 3-acetamido-4,5-dihydroxy-6-(hydroxymethyl)tetrahydro-2H-py ran-2-yl)oxy) pentanamido)propyl)-2-((hydroxyl)methyl)-4-methoxytetrahydr ofuran-3-oxyl
tgcaacctgacacaatgcta

SEQ ID NO: 851 - RNA, 20 nt, synthetic construct
  source 1..20: mol_type = other RNA
  modified_base 1: mod_base = OTHER; note = 2'-O-methyl-adenosine with phosphorothioate linkage
  modified_base 2: mod_base = OTHER; note = 2'-O-methyl-guanosine with phosphorothioate linkage
  modified_base 3: mod_base = OTHER; note = 2'-O-methyl-uridine
  modified_base 4: mod_base = OTHER; note = 2'-O-methyl-uridine
  modified_base 5: mod_base = OTHER; note = 2'-O-methyl-adenosine
  modified_base 6: mod_base = OTHER; note = 2'-fluoro-uridine
  modified_base 7: mod_base = OTHER; note = 2'-O-methyl-cytidine
  modified_base 8: mod_base = OTHER; note = 2'-fluoro-guanosine
  modified_base 9: mod_base = OTHER; note = 2'-fluoro-adenosine
  modified_base 10: mod_base = OTHER; note = 2'-fluoro-guanosine
  modified_base 11: mod_base = OTHER; note = 2'-fluoro-guanosine
  modified_base 12: mod_base = OTHER; note = 2'-O-methyl-cytidine
  modified_base 13: mod_base = OTHER; note = 2'-O-methyl-adenosine
  modified_base 14: mod_base = OTHER; note = 2'-O-methyl-cytidine
  modified_base 15: mod_base = OTHER; note = 2'-O-methyl-adenosine
  modified_base 16: mod_base = OTHER; note = 2'-O-methyl-uridine
  modified_base 17: mod_base = OTHER; note = 2'-O-methyl-uridine
  modified_base 18: mod_base = OTHER; note = 2'-O-methyl-cytidine with phosphorothioate linkage
  modified_base 19: mod_base = OTHER; note = 2'-O-methyl-uridine with phosphorothioate linkage
  modified_base 20: mod_base = OTHER; note = 2'-O-methyl-adenosine
  modified_base 20: mod_base = OTHER; note = Nucleotide conjugated to 3 iterations of (2R,3R,4R,5S)-5-(3-(5-(((2R,3R,4R,5R,6R)- 3-acetamido-4,5-dihydroxy-6-(hydroxymethyl)tetrahydro-2H-py ran-2-yl)oxy) pentanamido)propyl)-2-((hydroxyl)methyl)-4-methoxytetrahydr ofuran-3-oxyl
agttatcgaggcacattcta

SEQ ID NO: 852 - RNA, 20 nt, synthetic construct
  source 1..20: mol_type = other RNA
  modified_base 1: mod_base = OTHER; note = 2'-O-methyl-adenosine with phosphorothioate linkage
  modified_base 2: mod_base = OTHER; note = 2'-O-methyl-adenosine with phosphorothioate linkage
  modified_base 3: mod_base = OTHER; note = 2'-O-methyl-guanosine
  modified_base 4: mod_base = OTHER; note = 2'-O-methyl-cytidine
  modified_base 5: mod_base = OTHER; note = 2'-O-methyl-uridine
  modified_base 6: mod_base = OTHER; note = 2'-fluoro-uridine
  modified_base 7: mod_base = OTHER; note = 2'-O-methyl-guanosine
  modified_base 8: mod_base = OTHER; note = 2'-fluoro-guanosine
  modified_base 9: mod_base = OTHER; note = 2'-fluoro-uridine
  modified_base 10: mod_base = OTHER; note = 2'-fluoro-cytidine
  modified_base 11: mod_base = OTHER; note = 2'-fluoro-adenosine
  modified_base 12: mod_base = OTHER; note = 2'-O-methyl-uridine
  modified_base 13: mod_base = OTHER; note = 2'-O-methyl-cytidine
  modified_base 14: mod_base = OTHER; note = 2'-O-methyl-uridine
  modified_base 15: mod_base = OTHER; note = 2'-O-methyl-adenosine
  modified_base 16: mod_base = OTHER; note = 2'-O-methyl-uridine
  modified_base 17: mod_base = OTHER; note = 2'-O-methyl-guanosine
  modified_base 18: mod_base = OTHER; note = 2'-O-methyl-adenosine with phosphorothioate linkage
  modified_base 19: mod_base = OTHER; note = 2'-O-methyl-cytidine with phosphorothioate linkage
  modified_base 20: mod_base = OTHER; note = 2'-O-methyl-adenosine
  modified_base 20: mod_base = OTHER; note = Nucleotide conjugated to 3 iterations of (2R,3R,4R,5S)-5-(3-(5-(((2R,3R,4R,5R,6R)- 3-acetamido-4,5-dihydroxy-6-(hydroxymethyl)tetrahydro-2H-py ran-2-yl)oxy) pentanamido)propyl)-2-((hydroxyl)methyl)-4-methoxytetrahydr ofuran-3-oxyl
aagcttggtcatctatgaca

SEQ ID NO: 853 - RNA, 20 nt, synthetic construct
  source 1..20: mol_type = other RNA
  modified_base 1: mod_base = OTHER; note = 2'-O-methyl-cytidine with phosphorothioate linkage
  modified_base 2: mod_base = OTHER; note = 2'-O-methyl-adenosine with phosphorothioate linkage
  modified_base 3: mod_base = OTHER; note = 2'-O-methyl-uridine
  modified_base 4: mod_base = OTHER; note = 2'-O-methyl-guanosine
  modified_base 5: mod_base = OTHER; note = 2'-O-methyl-guanosine
  modified_base 6: mod_base = OTHER; note = 2'-fluoro-uridine
  modified_base 7: mod_base = OTHER; note = 2'-O-methyl-guanosine
  modified_base 8: mod_base = OTHER; note = 2'-fluoro-adenosine
  modified_base 9: mod_base = OTHER; note = 2'-fluoro-uridine
  modified_base 10: mod_base = OTHER; note = 2'-fluoro-guanosine
  modified_base 11: mod_base = OTHER; note = 2'-fluoro-guanosine
  modified_base 12: mod_base = OTHER; note = 2'-O-methyl-adenosine
  modified_base 13: mod_base = OTHER; note = 2'-O-methyl-cytidine
  modified_base 14: mod_base = OTHER; note = 2'-O-methyl-adenosine
  modified_base 15: mod_base = OTHER; note = 2'-O-methyl-guanosine
  modified_base 16: mod_base = OTHER; note = 2'-O-methyl-adenosine
  modified_base 17: mod_base = OTHER; note = 2'-O-methyl-guanosine
  modified_base 18: mod_base = OTHER; note = 2'-O-methyl-uridine with phosphorothioate linkage
  modified_base 19: mod_base = OTHER; note = 2'-O-methyl-uridine with phosphorothioate linkage
  modified_base 20: mod_base = OTHER; note = 2'-O-methyl-adenosine
  modified_base 20: mod_base = OTHER; note = Nucleotide conjugated to 3 iterations of (2R,3R,4R,5S)-5-(3-(5-(((2R,3R,4R,5R,6R)- 3-acetamido-4,5-dihydroxy-6-(hydroxymethyl)tetrahydro-2H-py ran-2-yl)oxy) pentanamido)propyl)-2-((hydroxyl)methyl)-4-methoxytetrahydr ofuran-3-oxyl
catggtgatggacagagtta

SEQ ID NO: 854 - RNA, 20 nt, synthetic construct
  source 1..20: mol_type = other RNA
  modified_base 1: mod_base = OTHER; note = 2'-O-methyl-uridine with phosphorothioate linkage
  modified_base 2: mod_base = OTHER; note = 2'-O-methyl-guanosine with phosphorothioate linkage
  modified_base 3: mod_base = OTHER; note = 2'-O-methyl-guanosine
  modified_base 4: mod_base = OTHER; note = 2'-O-methyl-adenosine
  modified_base 5: mod_base = OTHER; note = 2'-O-methyl-cytidine
  modified_base 6: mod_base = OTHER; note = 2'-fluoro-adenosine
  modified_base 7: mod_base = OTHER; note = 2'-O-methyl-guanosine
  modified_base 8: mod_base = OTHER; note = 2'-fluoro-adenosine
  modified_base 9: mod_base = OTHER; note = 2'-fluoro-guanosine
  modified_base 10: mod_base = OTHER; note = 2'-fluoro-uridine
  modified_base 11: mod_base = OTHER; note = 2'-fluoro-uridine
  modified_base 12: mod_base = OTHER; note = 2'-O-methyl-adenosine
  modified_base 13: mod_base = OTHER; note = 2'-O-methyl-uridine
  modified_base 14: mod_base = OTHER; note = 2'-O-methyl-cytidine
  modified_base 15: mod_base = OTHER; note = 2'-O-methyl-guanosine
  modified_base 16: mod_base = OTHER; note = 2'-O-methyl-adenosine
  modified_base 17: mod_base = OTHER; note = 2'-O-methyl-guanosine
  modified_base 18: mod_base = OTHER; note = 2'-O-methyl-guanosine with phosphorothioate linkage
  modified_base 19: mod_base = OTHER; note = 2'-O-methyl-cytidine with phosphorothioate linkage
  modified_base 20: mod_base = OTHER; note = 2'-O-methyl-adenosine
  modified_base 20: mod_base = OTHER; note = Nucleotide conjugated to 3 iterations of (2R,3R,4R,5S)-5-(3-(5-(((2R,3R,4R,5R,6R)- 3-acetamido-4,5-dihydroxy-6-(hydroxymethyl)tetrahydro-2H-py ran-2-yl)oxy) pentanamido)propyl)-2-((hydroxyl)methyl)-4-methoxytetrahydr ofuran-3-oxyl
tggacagagttatcgaggca

SEQ ID NO: 855 - RNA, 20 nt, synthetic construct
  source 1..20: mol_type = other RNA
  modified_base 1: mod_base = OTHER; note = 2'-O-methyl-guanosine with phosphorothioate linkage
  modified_base 2: mod_base = OTHER; note = 2'-O-methyl-guanosine with phosphorothioate linkage
  modified_base 3: mod_base = OTHER; note = 2'-O-methyl-cytidine
  modified_base 4: mod_base = OTHER; note = 2'-O-methyl-cytidine
  modified_base 5: mod_base = OTHER; note = 2'-O-methyl-uridine
  modified_base 6: mod_base = OTHER; note = 2'-fluoro-guanosine
  modified_base 7: mod_base = OTHER; note = 2'-O-methyl-adenosine
  modified_base 8: mod_base = OTHER; note = 2'-fluoro-cytidine
  modified_base 9: mod_base = OTHER; note = 2'-fluoro-cytidine
  modified_base 10: mod_base = OTHER; note = 2'-fluoro-adenosine
  modified_base 11: mod_base = OTHER; note = 2'-fluoro-guanosine
  modified_base 12: mod_base = OTHER; note = 2'-O-methyl-guanosine
  modified_base 13: mod_base = OTHER; note = 2'-O-methyl-adenosine
  modified_base 14: mod_base = OTHER; note = 2'-O-methyl-adenosine
  modified_base 15: mod_base = OTHER; note = 2'-O-methyl-cytidine
  modified_base 16: mod_base = OTHER; note = 2'-O-methyl-uridine
  modified_base 17: mod_base = OTHER; note = 2'-O-methyl-adenosine
  modified_base 18: mod_base = OTHER; note = 2'-O-methyl-cytidine with phosphorothioate linkage
  modified_base 19: mod_base = OTHER; note = 2'-O-methyl-uridine with phosphorothioate linkage
  modified_base 20: mod_base = OTHER; note = 2'-O-methyl-adenosine
  modified_base 20: mod_base = OTHER; note = Nucleotide conjugated to 3 iterations of (2R,3R,4R,5S)-5-(3-(5-(((2R,3R,4R,5R,6R)- 3-acetamido-4,5-dihydroxy-6-(hydroxymethyl)tetrahydro-2H-py ran-2-yl)oxy) pentanamido)propyl)-2-((hydroxyl)methyl)-4-methoxytetrahydr ofuran-3-oxyl
ggcctgaccaggaactacta

SEQ ID NO: 856 - RNA, 20 nt, synthetic construct
  source 1..20: mol_type = other RNA
  modified_base 1: mod_base = OTHER; note = 2'-O-methyl-adenosine with phosphorothioate linkage
  modified_base 2: mod_base = OTHER; note = 2'-O-methyl-adenosine with phosphorothioate linkage
  modified_base 3: mod_base = OTHER; note = 2'-O-methyl-guanosine
  modified_base 4: mod_base = OTHER; note = 2'-O-methyl-cytidine
  modified_base 5: mod_base = OTHER; note = 2'-O-methyl-adenosine
  modified_base 6: mod_base = OTHER; note = 2'-fluoro-cytidine
  modified_base 7: mod_base = OTHER; note = 2'-O-methyl-cytidine
  modified_base 8: mod_base = OTHER; note = 2'-fluoro-adenosine
  modified_base 9: mod_base = OTHER; note = 2'-fluoro-cytidine
  modified_base 10: mod_base = OTHER; note = 2'-fluoro-cytidine
  modified_base 11: mod_base = OTHER; note = 2'-fluoro-uridine
  modified_base 12: mod_base = OTHER; note = 2'-O-methyl-guanosine
  modified_base 13: mod_base = OTHER; note = 2'-O-methyl-adenosine
  modified_base 14: mod_base = OTHER; note = 2'-O-methyl-guanosine
  modified_base 15: mod_base = OTHER; note = 2'-O-methyl-adenosine
  modified_base 16: mod_base = OTHER; note = 2'-O-methyl-adenosine
  modified_base 17: mod_base = OTHER; note = 2'-O-methyl-adenosine
  modified_base 18: mod_base = OTHER; note = 2'-O-methyl-adenosine with phosphorothioate linkage
  modified_base 19: mod_base = OTHER; note = 2'-O-methyl-guanosine with phosphorothioate linkage
  modified_base 20: mod_base = OTHER; note = 2'-O-methyl-adenosine
  modified_base 20: mod_base = OTHER; note = Nucleotide conjugated to 3 iterations of (2R,3R,4R,5S)-5-(3-(5-(((2R,3R,4R,5R,6R)- 3-acetamido-4,5-dihydroxy-6-(hydroxymethyl)tetrahydro-2H-py ran-2-yl)oxy) pentanamido)propyl)-2-((hydroxyl)methyl)-4-methoxytetrahydr ofuran-3-oxyl
aagcaccacctgagaaaaga

SEQ ID NO: 857 - RNA, 20 nt, synthetic construct
  source 1..20: mol_type = other RNA
  modified_base 1: mod_base = OTHER; note = 2'-O-methyl-guanosine with phosphorothioate linkage
  modified_base 2: mod_base = OTHER; note = 2'-O-methyl-adenosine with phosphorothioate linkage
  modified_base 3: mod_base = OTHER; note = 2'-O-methyl-guanosine
  modified_base 4: mod_base = OTHER; note = 2'-O-methyl-uridine
  modified_base 5: mod_base = OTHER; note = 2'-O-methyl-uridine
  modified_base 6: mod_base = OTHER; note = 2'-fluoro-adenosine
  modified_base 7: mod_base = OTHER; note = 2'-O-methyl-uridine
  modified_base 8: mod_base = OTHER; note = 2'-fluoro-cytidine
  modified_base 9: mod_base = OTHER; note = 2'-fluoro-guanosine
  modified_base 10: mod_base = OTHER; note = 2'-fluoro-adenosine
  modified_base 11: mod_base = OTHER; note = 2'-fluoro-guanosine
  modified_base 12: mod_base = OTHER; note = 2'-O-methyl-guanosine
  modified_base 13: mod_base = OTHER; note = 2'-O-methyl-cytidine
  modified_base 14: mod_base = OTHER; note = 2'-O-methyl-adenosine
  modified_base 15: mod_base = OTHER; note = 2'-O-methyl-cytidine
  modified_base 16: mod_base = OTHER; note = 2'-O-methyl-adenosine
  modified_base 17: mod_base = OTHER; note = 2'-O-methyl-uridine
  modified_base 18: mod_base = OTHER; note = 2'-O-methyl-uridine with phosphorothioate linkage
  modified_base 19: mod_base = OTHER; note = 2'-O-methyl-cytidine with phosphorothioate linkage
  modified_base 20: mod_base = OTHER; note = 2'-O-methyl-adenosine
  modified_base 20: mod_base = OTHER; note = Nucleotide conjugated to 3 iterations of (2R,3R,4R,5S)-5-(3-(5-(((2R,3R,4R,5R,6R)- 3-acetamido-4,5-dihydroxy-6-(hydroxymethyl)tetrahydro-2H-py ran-2-yl)oxy) pentanamido)propyl)-2-((hydroxyl)methyl)-4-methoxytetrahydr ofuran-3-oxyl
gagttatcgaggcacattca

SEQ ID NO: 858 - RNA, 20 nt, synthetic construct
  source 1..20: mol_type = other RNA
  modified_base 1: mod_base = OTHER; note = 2'-O-methyl-adenosine with phosphorothioate linkage
  modified_base 2: mod_base = OTHER; note = 2'-O-methyl-cytidine with phosphorothioate linkage
  modified_base 3: mod_base = OTHER; note = 2'-O-methyl-cytidine
  modified_base 4: mod_base = OTHER; note = 2'-O-methyl-uridine
  modified_base 5: mod_base = OTHER; note = 2'-O-methyl-guanosine
  modified_base 6: mod_base = OTHER; note = 2'-fluoro-cytidine
  modified_base 7: mod_base = OTHER; note = 2'-O-methyl-cytidine
  modified_base 8: mod_base = OTHER; note = 2'-fluoro-adenosine
  modified_base 9: mod_base = OTHER; note = 2'-fluoro-adenosine
  modified_base 10: mod_base = OTHER; note = 2'-fluoro-guanosine
  modified_base 11: mod_base = OTHER; note = 2'-fluoro-cytidine
  modified_base 12: mod_base = OTHER; note = 2'-O-methyl-uridine
  modified_base 13: mod_base = OTHER; note = 2'-O-methyl-uridine
  modified_base 14: mod_base = OTHER; note = 2'-O-methyl-guanosine
  modified_base 15: mod_base = OTHER; note = 2'-O-methyl-guanosine
  modified_base 16: mod_base = OTHER; note = 2'-O-methyl-uridine
  modified_base 17: mod_base = OTHER; note = 2'-O-methyl-cytidine
  modified_base 18: mod_base = OTHER; note = 2'-O-methyl-adenosine with phosphorothioate linkage
  modified_base 19: mod_base = OTHER; note = 2'-O-methyl-uridine with phosphorothioate linkage
  modified_base 20: mod_base = OTHER; note = 2'-O-methyl-adenosine
  modified_base 20: mod_base = OTHER; note = Nucleotide conjugated to 3 iterations of (2R,3R,4R,5S)-5-(3-(5-(((2R,3R,4R,5R,6R)- 3-acetamido-4,5-dihydroxy-6-(hydroxymethyl)tetrahydro-2H-py ran-2-yl)oxy) pentanamido)propyl)-2-((hydroxyl)methyl)-4-methoxytetrahydr ofuran-3-oxyl
acctgccaagcttggtcata

SEQ ID NO: 859 - RNA, 20 nt, synthetic construct
  source 1..20: mol_type = other RNA
  modified_base 1: mod_base = OTHER; note = 2'-O-methyl-adenosine with phosphorothioate linkage
  modified_base 2: mod_base = OTHER; note = 2'-O-methyl-adenosine with phosphorothioate linkage
  modified_base 3: mod_base = OTHER; note = 2'-O-methyl-cytidine
  modified_base 4: mod_base = OTHER; note = 2'-O-methyl-uridine
  modified_base 5: mod_base = OTHER; note = 2'-O-methyl-uridine
  modified_base 6: mod_base = OTHER; note = 2'-fluoro-guanosine
  modified_base 7: mod_base = OTHER; note = 2'-O-methyl-cytidine
  modified_base 8: mod_base = OTHER; note = 2'-fluoro-cytidine
  modified_base 9: mod_base = OTHER; note = 2'-fluoro-adenosine
  modified_base 10: mod_base = OTHER; note = 2'-fluoro-adenosine
  modified_base 11: mod_base = OTHER; note = 2'-fluoro-guanosine
  modified_base 12: mod_base = OTHER; note = 2'-O-methyl-cytidine
  modified_base 13: mod_base = OTHER; note = 2'-O-methyl-uridine
  modified_base 14: mod_base = OTHER; note = 2'-O-methyl-uridine
  modified_base 15: mod_base = OTHER; note = 2'-O-methyl-guanosine
  modified_base 16: mod_base = OTHER; note = 2'-O-methyl-guanosine
  modified_base 17: mod_base = OTHER; note = 2'-O-methyl-uridine
  modified_base 18: mod_base = OTHER; note = 2'-O-methyl-cytidine with phosphorothioate linkage
  modified_base 19: mod_base = OTHER; note = 2'-O-methyl-adenosine with phosphorothioate linkage
  modified_base 20: mod_base = OTHER; note = 2'-O-methyl-adenosine
  modified_base 20: mod_base = OTHER; note = Nucleotide conjugated to 3 iterations of (2R,3R,4R,5S)-5-(3-(5-(((2R,3R,4R,5R,6R)- 3-acetamido-4,5-dihydroxy-6-(hydroxymethyl)tetrahydro-2H-py ran-2-yl)oxy) pentanamido)propyl)-2-((hydroxyl)methyl)-4-methoxytetrahydr ofuran-3-oxyl
aacttgccaagcttggtcaa

SEQ ID NO: 860 - RNA, 20 nt, synthetic construct
  source 1..20: mol_type = other RNA
  modified_base 1: mod_base = OTHER; note = 2'-O-methyl-guanosine with phosphorothioate linkage
  modified_base 2: mod_base = OTHER; note = 2'-O-methyl-adenosine with phosphorothioate linkage
  modified_base 3: mod_base = OTHER; note = 2'-O-methyl-adenosine
  modified_base 4: mod_base = OTHER; note = 2'-O-methyl-adenosine
  modified_base 5: mod_base = OTHER; note = 2'-O-methyl-uridine
  modified_base 6: mod_base = OTHER; note = 2'-fluoro-cytidine
  modified_base 7: mod_base = OTHER; note = 2'-O-methyl-cytidine
  modified_base 8: mod_base = OTHER; note = 2'-fluoro-adenosine
  modified_base 9: mod_base = OTHER; note = 2'-fluoro-guanosine
  modified_base 10: mod_base = OTHER; note = 2'-fluoro-adenosine
  modified_base 11: mod_base = OTHER; note = 2'-fluoro-uridine
  modified_base 12: mod_base = OTHER; note = 2'-O-methyl-cytidine
  modified_base 13: mod_base = OTHER; note = 2'-O-methyl-cytidine
  modified_base 14: mod_base = OTHER; note = 2'-O-methyl-uridine
  modified_base 15: mod_base = OTHER; note = 2'-O-methyl-guanosine
  modified_base 16: mod_base = OTHER; note = 2'-O-methyl-uridine
  modified_base 17: mod_base = OTHER; note = 2'-O-methyl-guanosine
  modified_base 18: mod_base = OTHER; note = 2'-O-methyl-guanosine with phosphorothioate linkage
  modified_base 19: mod_base = OTHER; note = 2'-O-methyl-cytidine with phosphorothioate linkage
  modified_base 20: mod_base = OTHER; note = 2'-O-methyl-adenosine
  modified_base 20: mod_base = OTHER; note = Nucleotide conjugated to 3 iterations of (2R,3R,4R,5S)-5-(3-(5-(((2R,3R,4R,5R,6R)- 3-acetamido-4,5-dihydroxy-6-(hydroxymethyl)tetrahydro-2H-py ran-2-yl)oxy) pentanamido)propyl)-2-((hydroxyl)methyl)-4-methoxytetrahydr ofuran-3-oxyl
gaaatccagatcctgtggca

SEQ ID NO: 861 - RNA, 20 nt, synthetic construct
  source 1..20: mol_type = other RNA
  modified_base 1: mod_base = OTHER; note = 2'-O-methyl-adenosine with phosphorothioate linkage
  modified_base 2: mod_base = OTHER; note = 2'-O-methyl-adenosine with phosphorothioate linkage
  modified_base 3: mod_base = OTHER; note = 2'-O-methyl-cytidine
  modified_base 4: mod_base = OTHER; note = 2'-O-methyl-cytidine
  modified_base 5: mod_base = OTHER; note = 2'-O-methyl-uridine
  modified_base 6: mod_base = OTHER; note = 2'-fluoro-guanosine
  modified_base 7: mod_base = OTHER; note = 2'-O-methyl-adenosine
  modified_base 8: mod_base = OTHER; note = 2'-fluoro-cytidine
  modified_base 9: mod_base = OTHER; note = 2'-fluoro-adenosine
  modified_base 10: mod_base = OTHER; note = 2'-fluoro-cytidine
  modified_base 11: mod_base = OTHER; note = 2'-fluoro-adenosine
  modified_base 12: mod_base = OTHER; note = 2'-O-methyl-adenosine
  modified_base 13: mod_base = OTHER; note = 2'-O-methyl-uridine
  modified_base 14: mod_base = OTHER; note = 2'-O-methyl-guanosine
  modified_base 15: mod_base = OTHER; note = 2'-O-methyl-cytidine
  modified_base 16: mod_base = OTHER; note = 2'-O-methyl-uridine
  modified_base 17: mod_base = OTHER; note = 2'-O-methyl-cytidine
  modified_base 18: mod_base = OTHER; note = 2'-O-methyl-adenosine with phosphorothioate linkage
  modified_base 19: mod_base = OTHER; note = 2'-O-methyl-guanosine with phosphorothioate linkage
  modified_base 20: mod_base = OTHER; note = 2'-O-methyl-adenosine
  modified_base 20: mod_base = OTHER; note = Nucleotide conjugated to 3 iterations of (2R,3R,4R,5S)-5-(3-(5-(((2R,3R,4R,5R,6R)- 3-acetamido-4,5-dihydroxy-6-(hydroxymethyl)tetrahydro-2H-py ran-2-yl)oxy) pentanamido)propyl)-2-((hydroxyl)methyl)-4-methoxytetrahydr ofuran-3-oxyl
aacctgacacaatgctcaga

SEQ ID NO: 862 - RNA, 20 nt, synthetic construct
  source 1..20: mol_type = other RNA
  modified_base 1: mod_base = OTHER; note = 2'-O-methyl-cytidine with phosphorothioate linkage
  modified_base 2: mod_base = OTHER; note = 2'-O-methyl-cytidine with phosphorothioate linkage
  modified_base 3: mod_base = OTHER; note = 2'-O-methyl-adenosine
  modified_base 4: mod_base = OTHER; note = 2'-O-methyl-uridine
  modified_base 5: mod_base = OTHER; note = 2'-O-methyl-guanosine
  modified_base 6: mod_base = OTHER; note = 2'-fluoro-guanosine
  modified_base 7: mod_base = OTHER; note = 2'-O-methyl-uridine
  modified_base 8: mod_base = OTHER; note = 2'-fluoro-guanosine
  modified_base 9: mod_base = OTHER; note = 2'-fluoro-adenosine
  modified_base 10: mod_base = OTHER; note = 2'-fluoro-uridine
  modified_base 11: mod_base = OTHER; note = 2'-fluoro-guanosine
  modified_base 12: mod_base = OTHER; note = 2'-O-methyl-guanosine
  modified_base 13: mod_base = OTHER; note = 2'-O-methyl-adenosine
  modified_base 14: mod_base = OTHER; note = 2'-O-methyl-cytidine
  modified_base 15: mod_base = OTHER; note = 2'-O-methyl-adenosine
  modified_base 16: mod_base = OTHER; note = 2'-O-methyl-guanosine
  modified_base 17: mod_base = OTHER; note = 2'-O-methyl-adenosine
  modified_base 18: mod_base = OTHER; note = 2'-O-methyl-guanosine with phosphorothioate linkage
  modified_base 19: mod_base = OTHER; note = 2'-O-methyl-uridine with phosphorothioate linkage
  modified_base 20: mod_base = OTHER; note = 2'-O-methyl-adenosine
  modified_base 20: mod_base = OTHER; note = Nucleotide conjugated to 3 iterations of (2R,3R,4R,5S)-5-(3-(5-(((2R,3R,4R,5R,6R)- 3-acetamido-4,5-dihydroxy-6-(hydroxymethyl)tetrahydro-2H-py ran-2-yl)oxy) pentanamido)propyl)-2-((hydroxyl)methyl)-4-methoxytetrahydr ofuran-3-oxyl
ccatggtgatggacagagta

SEQ ID NO: 863 - RNA, 20 nt, synthetic construct
  source 1..20: mol_type = other RNA
  modified_base 1: mod_base = OTHER; note = 2'-O-methyl-cytidine with phosphorothioate linkage
  modified_base 2: mod_base = OTHER; note = 2'-O-methyl-adenosine with phosphorothioate linkage
  modified_base 3: mod_base = OTHER; note = 2'-O-methyl-guanosine
  modified_base 4: mod_base = OTHER; note = 2'-O-methyl-adenosine
  modified_base 5: mod_base = OTHER; note = 2'-O-methyl-guanosine
  modified_base 6: mod_base = OTHER; note = 2'-fluoro-uridine
  modified_base 7: mod_base = OTHER; note = 2'-O-methyl-uridine
  modified_base 8: mod_base = OTHER; note = 2'-fluoro-adenosine
  modified_base 9: mod_base = OTHER; note = 2'-fluoro-uridine
  modified_base 10: mod_base = OTHER; note = 2'-fluoro-cytidine
  modified_base 11: mod_base = OTHER; note = 2'-fluoro-guanosine
  modified_base 12: mod_base = OTHER; note = 2'-O-methyl-adenosine
  modified_base 13: mod_base = OTHER; note = 2'-O-methyl-guanosine
  modified_base 14: mod_base = OTHER; note = 2'-O-methyl-guanosine
  modified_base 15: mod_base = OTHER; note = 2'-O-methyl-cytidine
  modified_base 16: mod_base = OTHER; note = 2'-O-methyl-adenosine
  modified_base 17: mod_base = OTHER; note = 2'-O-methyl-cytidine
  modified_base 18: mod_base = OTHER; note = 2'-O-methyl-adenosine with phosphorothioate linkage
  modified_base 19: mod_base = OTHER; note = 2'-O-methyl-uridine with phosphorothioate linkage
  modified_base 20: mod_base = OTHER; note = 2'-O-methyl-adenosine
  modified_base 20: mod_base = OTHER; note = Nucleotide conjugated to 3 iterations of (2R,3R,4R,5S)-5-(3-(5-(((2R,3R,4R,5R,6R)- 3-acetamido-4,5-dihydroxy-6-(hydroxymethyl)tetrahydro-2H-py ran-2-yl)oxy) pentanamido)propyl)-2-((hydroxyl)methyl)-4-methoxytetrahydr ofuran-3-oxyl
cagagttatcgaggcacata

SEQ ID NO: 864 - RNA, 20 nt, synthetic construct
  source 1..20: mol_type = other RNA
  modified_base 1: mod_base = OTHER; note = 2'-O-methyl-uridine with phosphorothioate linkage
  modified_base 2: mod_base = OTHER; note = 2'-O-methyl-guanosine with phosphorothioate linkage
  modified_base 3: mod_base = OTHER; note = 2'-O-methyl-cytidine
  modified_base 4: mod_base = OTHER; note = 2'-O-methyl-cytidine
  modified_base 5: mod_base = OTHER; note = 2'-O-methyl-adenosine
  modified_base 6: mod_base = OTHER; note = 2'-fluoro-adenosine
  modified_base 7: mod_base = OTHER; note = 2'-O-methyl-guanosine
  modified_base 8: mod_base = OTHER; note = 2'-fluoro-cytidine
  modified_base 9: mod_base = OTHER; note = 2'-fluoro-uridine
  modified_base 10: mod_base = OTHER; note = 2'-fluoro-uridine
  modified_base 11: mod_base = OTHER; note = 2'-fluoro-guanosine
  modified_base 12: mod_base = OTHER; note = 2'-O-methyl-guanosine
  modified_base 13: mod_base = OTHER; note = 2'-O-methyl-uridine
  modified_base 14: mod_base = OTHER; note = 2'-O-methyl-cytidine
  modified_base 15: mod_base = OTHER; note = 2'-O-methyl-adenosine
  modified_base 16: mod_base = OTHER; note = 2'-O-methyl-uridine
  modified_base 17: mod_base = OTHER; note = 2'-O-methyl-cytidine
  modified_base 18: mod_base = OTHER; note = 2'-O-methyl-uridine with phosphorothioate linkage
  modified_base 19: mod_base = OTHER; note = 2'-O-methyl-adenosine with phosphorothioate linkage
  modified_base 20: mod_base = OTHER; note = 2'-O-methyl-adenosine
  modified_base 20: mod_base = OTHER; note = Nucleotide conjugated to 3 iterations of (2R,3R,4R,5S)-5-(3-(5-(((2R,3R,4R,5R,6R)- 3-acetamido-4,5-dihydroxy-6-(hydroxymethyl)tetrahydro-2H-py ran-2-yl)oxy) pentanamido)propyl)-2-((hydroxyl)methyl)-4-methoxytetrahydr ofuran-3-oxyl
tgccaagcttggtcatctaa

SEQ ID NO: 865 - RNA, 20 nt, synthetic construct
  source 1..20: mol_type = other RNA
  modified_base 1: mod_base = OTHER; note = 2'-O-methyl-uridine with phosphorothioate linkage
  modified_base 2: mod_base = OTHER; note = 2'-O-methyl-cytidine with phosphorothioate linkage
  modified_base 3: mod_base = OTHER; note = 2'-O-methyl-adenosine
  modified_base 4: mod_base = OTHER; note = 2'-O-methyl-adenosine
  modified_base 5: mod_base = OTHER; note = 2'-O-methyl-guanosine
  modified_base 6: mod_base = OTHER; note = 2'-fluoro-uridine
  modified_base 7: mod_base = OTHER; note = 2'-O-methyl-guanosine
  modified_base 8: mod_base = OTHER; note = 2'-fluoro-uridine
  modified_base 9: mod_base = OTHER; note = 2'-fluoro-cytidine
  modified_base 10: mod_base = OTHER; note = 2'-fluoro-cytidine
  modified_base 11: mod_base = OTHER; note = 2'-fluoro-uridine
  modified_base 12: mod_base = OTHER; note = 2'-O-methyl-uridine
  modified_base 13: mod_base = OTHER; note = 2'-O-methyl-guanosine
  modified_base 14: mod_base = OTHER; note = 2'-O-methyl-cytidine
  modified_base 15: mod_base = OTHER; note = 2'-O-methyl-adenosine
  modified_base 16: mod_base = OTHER; note = 2'-O-methyl-adenosine
  modified_base 17: mod_base = OTHER; note = 2'-O-methyl-cytidine
  modified_base 18: mod_base = OTHER; note = 2'-O-methyl-uridine with phosphorothioate linkage
  modified_base 19: mod_base = OTHER; note = 2'-O-methyl-cytidine with phosphorothioate linkage
  modified_base 20: mod_base = OTHER; note = 2'-O-methyl-adenosine
  modified_base 20: mod_base = OTHER; note = Nucleotide conjugated to 3 iterations of (2R,3R,4R,5S)-5-(3-(5-(((2R,3R,4R,5R,6R)- 3-acetamido-4,5-dihydroxy-6-(hydroxymethyl)tetrahydro-2H-py ran-2-yl)oxy) pentanamido)propyl)-2-((hydroxyl)methyl)-4-methoxytetrahydr ofuran-3-oxyl
tcaagtgtccttgcaactca

SEQ ID NO: 866 - RNA, 20 nt, synthetic construct
  source 1..20: mol_type = other RNA
  modified_base 1: mod_base = OTHER; note = 2'-O-methyl-cytidine with phosphorothioate linkage
  modified_base 2: mod_base = OTHER; note = 2'-O-methyl-adenosine with phosphorothioate linkage
  modified_base 3: mod_base = OTHER; note = 2'-O-methyl-uridine
  modified_base 4: mod_base = OTHER; note = 2'-O-methyl-cytidine
  modified_base 5: mod_base = OTHER; note = 2'-O-methyl-uridine
  modified_base 6: mod_base = OTHER; note = 2'-fluoro-adenosine
  modified_base 7: mod_base = OTHER; note = 2'-O-methyl-uridine
  modified_base 8: mod_base = OTHER; note = 2'-fluoro-guanosine
  modified_base 9: mod_base = OTHER; note = 2'-fluoro-adenosine
  modified_base 10: mod_base = OTHER; note = 2'-fluoro-cytidine
  modified_base 11: mod_base = OTHER; note = 2'-fluoro-adenosine
  modified_base 12: mod_base = OTHER; note = 2'-O-methyl-cytidine
  modified_base 13: mod_base = OTHER; note = 2'-O-methyl-cytidine
  modified_base 14: mod_base = OTHER; note = 2'-O-methyl-adenosine
  modified_base 15: mod_base = OTHER; note = 2'-O-methyl-cytidine
  modified_base 16: mod_base = OTHER; note = 2'-O-methyl-adenosine
  modified_base 17: mod_base = OTHER; note = 2'-O-methyl-cytidine
  modified_base 18: mod_base = OTHER; note = 2'-O-methyl-uridine with phosphorothioate linkage
  modified_base 19: mod_base = OTHER; note = 2'-O-methyl-cytidine with phosphorothioate linkage
  modified_base 20: mod_base = OTHER; note = 2'-O-methyl-adenosine
  modified_base 20: mod_base = OTHER; note = Nucleotide conjugated to 3 iterations of (2R,3R,4R,5S)-5-(3-(5-(((2R,3R,4R,5R,6R)- 3-acetamido-4,5-dihydroxy-6-(hydroxymethyl)tetrahydro-2H-py ran-2-yl)oxy) pentanamido)propyl)-2-((hydroxyl)methyl)-4-methoxytetrahydr ofuran-3-oxyl
catctatgacaccacactca

SEQ ID NO: 867 - RNA, 20 nt, synthetic construct
  source 1..20: mol_type = other RNA
  modified_base 1: mod_base = OTHER; note = 2'-O-methyl-adenosine with phosphorothioate linkage
  modified_base 2: mod_base = OTHER; note = 2'-O-methyl-adenosine with phosphorothioate linkage
  modified_base 3: mod_base = OTHER; note = 2'-O-methyl-cytidine
  modified_base 4: mod_base = OTHER; note = 2'-O-methyl-cytidine
  modified_base 5: mod_base = OTHER; note = 2'-O-methyl-uridine
  modified_base 6: mod_base = OTHER; note = 2'-fluoro-guanosine
  modified_base 7: mod_base = OTHER; note = 2'-O-methyl-cytidine
  modified_base 8: mod_base = OTHER; note = 2'-fluoro-cytidine
  modified_base 9: mod_base = OTHER; note = 2'-fluoro-adenosine
  modified_base 10: mod_base = OTHER; note = 2'-fluoro-adenosine
  modified_base 11: mod_base = OTHER; note = 2'-fluoro-guanosine
  modified_base 12: mod_base = OTHER; note = 2'-O-methyl-cytidine
  modified_base 13: mod_base = OTHER; note = 2'-O-methyl-uridine
  modified_base 14: mod_base = OTHER; note = 2'-O-methyl-uridine
  modified_base 15: mod_base = OTHER; note = 2'-O-methyl-guanosine
  modified_base 16: mod_base = OTHER; note = 2'-O-methyl-guanosine
  modified_base 17: mod_base = OTHER; note = 2'-O-methyl-uridine
  modified_base 18: mod_base = OTHER; note = 2'-O-methyl-cytidine with phosphorothioate linkage
  modified_base 19: mod_base = OTHER; note = 2'-O-methyl-adenosine with phosphorothioate linkage
  modified_base 20: mod_base = OTHER; note = 2'-O-methyl-adenosine
  modified_base 20: mod_base = OTHER; note = Nucleotide conjugated to 3 iterations of (2R,3R,4R,5S)-5-(3-(5-(((2R,3R,4R,5R,6R)- 3-acetamido-4,5-dihydroxy-6-(hydroxymethyl)tetrahydro-2H-py ran-2-yl)oxy) pentanamido)propyl)-2-((hydroxyl)methyl)-4-methoxytetrahydr ofuran-3-oxyl
aacctgccaagcttggtcaa

SEQ ID NO: 868 - RNA, 20 nt, synthetic construct
  source 1..20: mol_type = other RNA
  modified_base 1: mod_base = OTHER; note = 2'-O-methyl-guanosine with phosphorothioate linkage
  modified_base 2: mod_base = OTHER; note = 2'-O-methyl-adenosine with phosphorothioate linkage
  modified_base 3: mod_base = OTHER; note = 2'-O-methyl-adenosine
  modified_base 4: mod_base = OTHER; note = 2'-O-methyl-cytidine
  modified_base 5: mod_base = OTHER; note = 2'-O-methyl-adenosine
  modified_base 6: mod_base = OTHER; note = 2'-fluoro-adenosine
  modified_base 7: mod_base = OTHER; note = 2'-O-methyl-guanosine
  modified_base 8: mod_base = OTHER; note = 2'-fluoro-cytidine
  modified_base 9: mod_base = OTHER; note = 2'-fluoro-adenosine
  modified_base 10: mod_base = OTHER; note = 2'-fluoro-cytidine
  modified_base 11: mod_base = OTHER; note = 2'-fluoro-cytidine
  modified_base 12: mod_base = OTHER; note = 2'-O-methyl-guanosine
  modified_base 13: mod_base = OTHER; note = 2'-O-methyl-adenosine
  modified_base 14: mod_base = OTHER; note = 2'-O-methyl-cytidine
  modified_base 15: mod_base = OTHER; note = 2'-O-methyl-uridine
  modified_base 16: mod_base = OTHER; note = 2'-O-methyl-guanosine
  modified_base 17: mod_base = OTHER; note = 2'-O-methyl-adenosine
  modified_base 18: mod_base = OTHER; note = 2'-O-methyl-guanosine with phosphorothioate linkage
  modified_base 19: mod_base = OTHER; note = 2'-O-methyl-cytidine with phosphorothioate linkage
  modified_base 20: mod_base = OTHER; note = 2'-O-methyl-adenosine
  modified_base 20: mod_base = OTHER; note = Nucleotide conjugated to 3 iterations of (2R,3R,4R,5S)-5-(3-(5-(((2R,3R,4R,5R,6R)- 3-acetamido-4,5-dihydroxy-6-(hydroxymethyl)tetrahydro-2H-py ran-2-yl)oxy) pentanamido)propyl)-2-((hydroxyl)methyl)-4-methoxytetrahydr ofuran-3-oxyl
gaacaagcaccgactgagca

SEQ ID NO: 869 - RNA, 20 nt, synthetic construct
  source 1..20: mol_type = other RNA
  modified_base 1: mod_base = OTHER; note = 2'-O-methyl-guanosine with phosphorothioate linkage
  modified_base 2: mod_base = OTHER; note = 2'-O-methyl-uridine with phosphorothioate linkage
  modified_base 3: mod_base = OTHER; note = 2'-O-methyl-uridine
  modified_base 4: mod_base = OTHER; note = 2'-O-methyl-adenosine
  modified_base 5: mod_base = OTHER; note = 2'-O-methyl-uridine
  modified_base 6: mod_base = OTHER; note = 2'-fluoro-cytidine
  modified_base 7: mod_base = OTHER; note = 2'-O-methyl-guanosine
  modified_base 8: mod_base = OTHER; note = 2'-fluoro-adenosine
  modified_base 9: mod_base = OTHER; note = 2'-fluoro-guanosine
  modified_base 10: mod_base = OTHER; note = 2'-fluoro-guanosine
  modified_base 11: mod_base = OTHER; note = 2'-fluoro-cytidine
  modified_base 12: mod_base = OTHER; note = 2'-O-methyl-uridine
  modified_base 13: mod_base = OTHER; note = 2'-O-methyl-cytidine
  modified_base 14: mod_base = OTHER; note = 2'-O-methyl-adenosine
  modified_base 15: mod_base = OTHER; note = 2'-O-methyl-uridine
  modified_base 16: mod_base = OTHER; note = 2'-O-methyl-uridine
  modified_base 17: mod_base = OTHER; note = 2'-O-methyl-cytidine
  modified_base 18: mod_base = OTHER; note = 2'-O-methyl-uridine with phosphorothioate linkage
  modified_base 19: mod_base = OTHER; note = 2'-O-methyl-cytidine with phosphorothioate linkage
  modified_base 20: mod_base = OTHER; note = 2'-O-methyl-adenosine
  modified_base 20: mod_base = OTHER; note = Nucleotide conjugated to 3 iterations of (2R,3R,4R,5S)-5-(3-(5-(((2R,3R,4R,5R,6R)- 3-acetamido-4,5-dihydroxy-6-(hydroxymethyl)tetrahydro-2H-py ran-2-yl)oxy) pentanamido)propyl)-2-((hydroxyl)methyl)-4-methoxytetrahydr ofuran-3-oxyl
gttatcgaggctcattctca

SEQ ID NO: 870 - RNA, 20 nt, synthetic construct
  source 1..20: mol_type = other RNA
  modified_base 1: mod_base = OTHER; note = 2'-O-methyl-guanosine with phosphorothioate linkage
  modified_base 2: mod_base = OTHER; note = 2'-O-methyl-adenosine with phosphorothioate linkage
  modified_base 3: mod_base = OTHER; note = 2'-O-methyl-adenosine
  modified_base 4: mod_base = OTHER; note = 2'-O-methyl-uridine
  modified_base 5: mod_base = OTHER; note = 2'-O-methyl-cytidine
  modified_base 6: mod_base = OTHER; note = 2'-fluoro-adenosine
  modified_base 7: mod_base = OTHER; note = 2'-O-methyl-adenosine
  modified_base 8: mod_base = OTHER; note = 2'-fluoro-guanosine
  modified_base 9: mod_base = OTHER; note = 2'-fluoro-uridine
  modified_base 10: mod_base = OTHER; note = 2'-fluoro-guanosine
  modified_base 11: mod_base = OTHER; note = 2'-fluoro-uridine
  modified_base 12: mod_base = OTHER; note = 2'-O-methyl-cytidine
  modified_base 13: mod_base = OTHER; note = 2'-O-methyl-cytidine
  modified_base 14: mod_base = OTHER; note = 2'-O-methyl-uridine
  modified_base 15: mod_base = OTHER; note = 2'-O-methyl-uridine
  modified_base 16: mod_base = OTHER; note = 2'-O-methyl-guanosine
  modified_base 17: mod_base = OTHER; note = 2'-O-methyl-cytidine
  modified_base 18: mod_base = OTHER; note = 2'-O-methyl-adenosine with phosphorothioate linkage
  modified_base 19: mod_base = OTHER; note = 2'-O-methyl-adenosine with phosphorothioate linkage
  modified_base 20: mod_base = OTHER; note = 2'-O-methyl-adenosine
  modified_base 20: mod_base = OTHER; note = Nucleotide conjugated to 3 iterations of (2R,3R,4R,5S)-5-(3-(5-(((2R,3R,4R,5R,6R)- 3-acetamido-4,5-dihydroxy-6-(hydroxymethyl)tetrahydro-2H-py ran-2-yl)oxy) pentanamido)propyl)-2-((hydroxyl)methyl)-4-methoxytetrahydr ofuran-3-oxyl
gaatcaagtgtccttgcaaa

SEQ ID NO: 871 - RNA, 20 nt, synthetic construct
  source 1..20: mol_type = other RNA
  modified_base 1: mod_base = OTHER; note = 2'-O-methyl-guanosine with phosphorothioate linkage
  modified_base 2: mod_base = OTHER; note = 2'-O-methyl-uridine with phosphorothioate linkage
  modified_base 3: mod_base = OTHER; note = 2'-O-methyl-cytidine
  modified_base 4: mod_base = OTHER; note = 2'-O-methyl-adenosine
  modified_base 5: mod_base = OTHER; note = 2'-O-methyl-guanosine
  modified_base 6: mod_base = OTHER; note = 2'-fluoro-adenosine
  modified_base 7: mod_base = OTHER; note = 2'-O-methyl-uridine
  modified_base 8: mod_base = OTHER; note = 2'-fluoro-guanosine
  modified_base 9: mod_base = OTHER; note = 2'-fluoro-guanosine
  modified_base 10: mod_base = OTHER; note = 2'-fluoro-guanosine
  modified_base 11: mod_base = OTHER; note = 2'-fluoro-adenosine
  modified_base 12: mod_base = OTHER; note = 2'-O-methyl-guanosine
  modified_base 13: mod_base = OTHER; note = 2'-O-methyl-uridine
  modified_base 14: mod_base = OTHER; note = 2'-O-methyl-adenosine
  modified_base 15: mod_base = OTHER; note = 2'-O-methyl-cytidine
  modified_base 16: mod_base = OTHER; note = 2'-O-methyl-uridine
  modified_base 17: mod_base = OTHER; note = 2'-O-methyl-guanosine
  modified_base 18: mod_base = OTHER; note = 2'-O-methyl-cytidine with phosphorothioate linkage
  modified_base 19: mod_base = OTHER; note = 2'-O-methyl-adenosine with phosphorothioate linkage
  modified_base 20: mod_base = OTHER; note = 2'-O-methyl-adenosine
  modified_base 20: mod_base = OTHER; note = Nucleotide conjugated to 3 iterations of (2R,3R,4R,5S)-5-(3-(5-(((2R,3R,4R,5R,6R)- 3-acetamido-4,5-dihydroxy-6-(hydroxymethyl)tetrahydro-2H-py ran-2-yl)oxy) pentanamido)propyl)-2-((hydroxyl)methyl)-4-methoxytetrahydr ofuran-3-oxyl
gtcagatgggagtactgcaa

SEQ ID NO: 872 - RNA, 20 nt, synthetic construct
  source 1..20: mol_type = other RNA
  modified_base 1: mod_base = OTHER; note = 2'-O-methyl-guanosine with phosphorothioate linkage
  modified_base 2: mod_base = OTHER; note = 2'-O-methyl-cytidine with phosphorothioate linkage
  modified_base 3: mod_base = OTHER; note = 2'-O-methyl-adenosine
  modified_base 4: mod_base = OTHER; note = 2'-O-methyl-cytidine
  modified_base 5: mod_base = OTHER; note = 2'-O-methyl-adenosine
  modified_base 6: mod_base = OTHER; note = 2'-fluoro-uridine
  modified_base 7: mod_base = OTHER; note = 2'-O-methyl-uridine
  modified_base 8: mod_base = OTHER; note = 2'-fluoro-cytidine
  modified_base 9: mod_base = OTHER; note = 2'-fluoro-uridine
  modified_base 10: mod_base = OTHER; note = 2'-fluoro-cytidine
  modified_base 11: mod_base = OTHER; note = 2'-fluoro-cytidine
  modified_base 12: mod_base = OTHER; note = 2'-O-methyl-adenosine
  modified_base 13: mod_base = OTHER; note = 2'-O-methyl-cytidine
  modified_base 14: mod_base = OTHER; note = 2'-O-methyl-cytidine
  modified_base 15: mod_base = OTHER; note = 2'-O-methyl-adenosine
  modified_base 16: mod_base = OTHER; note = 2'-O-methyl-cytidine
  modified_base 17: mod_base = OTHER; note = 2'-O-methyl-uridine
  modified_base 18: mod_base = OTHER; note = 2'-O-methyl-guanosine with phosphorothioate linkage
  modified_base 19: mod_base = OTHER; note = 2'-O-methyl-uridine with phosphorothioate linkage
  modified_base 20: mod_base = OTHER; note = 2'-O-methyl-adenosine
  modified_base 20: mod_base = OTHER; note = Nucleotide conjugated to 3 iterations of (2R,3R,4R,5S)-5-(3-(5-(((2R,3R,4R,5R,6R)- 3-acetamido-4,5-dihydroxy-6-(hydroxymethyl)tetrahydro-2H-py ran-2-yl)oxy) pentanamido)propyl)-2-((hydroxyl)methyl)-4-methoxytetrahydr ofuran-3-oxyl
gcacattctccaccactgta

SEQ ID NO: 873 - RNA, 20 nt, synthetic construct
  source 1..20: mol_type = other RNA
  modified_base 1: mod_base = OTHER; note = 2'-O-methyl-guanosine with phosphorothioate linkage
  modified_base 2: mod_base = OTHER; note = 2'-O-methyl-cytidine with phosphorothioate linkage
  modified_base 3: mod_base = OTHER; note = 2'-O-methyl-cytidine
  modified_base 4: mod_base = OTHER; note = 2'-O-methyl-adenosine
  modified_base 5: mod_base = OTHER; note = 2'-O-methyl-adenosine
  modified_base 6: mod_base = OTHER; note = 2'-fluoro-guanosine
  modified_base 7: mod_base = OTHER; note = 2'-O-methyl-cytidine
  modified_base 8: mod_base = OTHER; note = 2'-fluoro-uridine
  modified_base 9: mod_base = OTHER; note = 2'-fluoro-uridine
  modified_base 10: mod_base = OTHER; note = 2'-fluoro-guanosine
  modified_base 11: mod_base = OTHER; note = 2'-fluoro-guanosine
  modified_base 12: mod_base = OTHER; note = 2'-O-methyl-uridine
  modified_base 13: mod_base = OTHER; note = 2'-O-methyl-cytidine
  modified_base 14: mod_base = OTHER; note = 2'-O-methyl-adenosine
  modified_base 15: mod_base = OTHER; note = 2'-O-methyl-uridine
  modified_base 16: mod_base = OTHER; note = 2'-O-methyl-cytidine
  modified_base 17: mod_base = OTHER; note = 2'-O-methyl-uridine
  modified_base 18: mod_base = OTHER; note = 2'-O-methyl-adenosine with phosphorothioate linkage
  modified_base 19: mod_base = OTHER; note = 2'-O-methyl-uridine with phosphorothioate linkage
  modified_base 20: mod_base = OTHER; note = 2'-O-methyl-adenosine
  modified_base 20: mod_base = OTHER; note = Nucleotide conjugated to 3 iterations of (2R,3R,4R,5S)-5-(3-(5-(((2R,3R,4R,5R,6R)- 3-acetamido-4,5-dihydroxy-6-(hydroxymethyl)tetrahydro-2H-py ran-2-yl)oxy) pentanamido)propyl)-2-((hydroxyl)methyl)-4-methoxytetrahydr ofuran-3-oxyl
gccaagcttggtcatctata

SEQ ID NO: 874 - RNA, 20 nt, synthetic construct
  source 1..20: mol_type = other RNA
  modified_base 1: mod_base = OTHER; note = 2'-O-methyl-uridine with phosphorothioate linkage
  modified_base 2: mod_base = OTHER; note = 2'-O-methyl-adenosine with phosphorothioate linkage
  modified_base 3: mod_base = OTHER; note = 2'-O-methyl-cytidine
  modified_base 4: mod_base = OTHER; note = 2'-O-methyl-uridine
  modified_base 5: mod_base = OTHER; note = 2'-O-methyl-guanosine
  modified_base 6: mod_base = OTHER; note = 2'-fluoro-cytidine
  modified_base 7: mod_base = OTHER; note = 2'-O-methyl-adenosine
  modified_base 8: mod_base = OTHER; note = 2'-fluoro-adenosine
  modified_base 9: mod_base = OTHER; note = 2'-fluoro-cytidine
  modified_base 10: mod_base = OTHER; note = 2'-fluoro-cytidine
  modified_base 11: mod_base = OTHER; note = 2'-fluoro-uridine
  modified_base 12: mod_base = OTHER; note = 2'-O-methyl-guanosine
  modified_base 13: mod_base = OTHER; note = 2'-O-methyl-adenosine
  modified_base 14: mod_base = OTHER; note = 2'-O-methyl-cytidine
  modified_base 15: mod_base = OTHER; note = 2'-O-methyl-adenosine
  modified_base 16: mod_base = OTHER; note = 2'-O-methyl-cytidine
  modified_base 17: mod_base = OTHER; note = 2'-O-methyl-adenosine
  modified_base 18: mod_base = OTHER; note = 2'-O-methyl-adenosine with phosphorothioate linkage
  modified_base 19: mod_base = OTHER; note = 2'-O-methyl-uridine with phosphorothioate linkage
  modified_base 20: mod_base = OTHER; note = 2'-O-methyl-adenosine
  modified_base 20: mod_base = OTHER; note = Nucleotide conjugated to 3 iterations of (2R,3R,4R,5S)-5-(3-(5-(((2R,3R,4R,5R,6R)- 3-acetamido-4,5-dihydroxy-6-(hydroxymethyl)tetrahydro-2H-py ran-2-yl)oxy) pentanamido)propyl)-2-((hydroxyl)methyl)-4-methoxytetrahydr ofuran-3-oxyl
tactgcaacctgacacaata

SEQ ID NO: 875 - RNA, 20 nt, synthetic construct
  source 1..20: mol_type = other RNA
  modified_base 1: mod_base = OTHER; note = 2'-O-methyl-uridine with phosphorothioate linkage
  modified_base 2: mod_base = OTHER; note = 2'-O-methyl-guanosine with phosphorothioate linkage
  modified_base 3: mod_base = OTHER; note = 2'-O-methyl-cytidine
  modified_base 4: mod_base = OTHER; note = 2'-O-methyl-uridine
  modified_base 5: mod_base = OTHER; note = 2'-O-methyl-adenosine
  modified_base 6: mod_base = OTHER; note = 2'-fluoro-cytidine
  modified_base 7: mod_base = OTHER; note = 2'-O-methyl-cytidine
  modified_base 8: mod_base = OTHER; note = 2'-fluoro-adenosine
  modified_base 9: mod_base = OTHER; note = 2'-fluoro-uridine
  modified_base 10: mod_base = OTHER; note = 2'-fluoro-guanosine
  modified_base 11: mod_base = OTHER; note = 2'-fluoro-guanosine
  modified_base 12: mod_base = OTHER; note = 2'-O-methyl-uridine
  modified_base 13: mod_base = OTHER; note = 2'-O-methyl-guanosine
  modified_base 14: mod_base = OTHER; note = 2'-O-methyl-adenosine
  modified_base 15: mod_base = OTHER; note = 2'-O-methyl-uridine
  modified_base 16: mod_base = OTHER; note = 2'-O-methyl-guanosine
  modified_base 17: mod_base = OTHER; note = 2'-O-methyl-guanosine
  modified_base 18: mod_base = OTHER; note = 2'-O-methyl-adenosine with phosphorothioate linkage
  modified_base 19: mod_base = OTHER; note = 2'-O-methyl-cytidine with phosphorothioate linkage
  modified_base 20: mod_base = OTHER; note = 2'-O-methyl-adenosine
  modified_base 20: mod_base = OTHER; note = Nucleotide conjugated to 3 iterations of (2R,3R,4R,5S)-5-(3-(5-(((2R,3R,4R,5R,6R)- 3-acetamido-4,5-dihydroxy-6-(hydroxymethyl)tetrahydro-2H-py ran-2-yl)oxy) pentanamido)propyl)-2-((hydroxyl)methyl)-4-methoxytetrahydr ofuran-3-oxyl
tgctaccatggtgatggaca

SEQ ID NO: 876 - RNA, 20 nt, synthetic construct
  source 1..20: mol_type = other RNA
  modified_base 1: mod_base = OTHER; note = 2'-O-methyl-uridine with phosphorothioate linkage
  modified_base 2: mod_base = OTHER; note = 2'-O-methyl-uridine with phosphorothioate linkage
  modified_base 3: mod_base = OTHER; note = 2'-O-methyl-guanosine
  modified_base 4: mod_base = OTHER; note = 2'-O-methyl-guanosine
  modified_base 5: mod_base = OTHER; note = 2'-O-methyl-uridine
  modified_base 6: mod_base = OTHER; note = 2'-fluoro-cytidine
  modified_base 7: mod_base = OTHER; note = 2'-O-methyl-adenosine
  modified_base 8: mod_base = OTHER; note = 2'-fluoro-uridine
  modified_base 9: mod_base = OTHER; note = 2'-fluoro-cytidine
  modified_base 10: mod_base = OTHER; note = 2'-fluoro-cytidine
  modified_base 11: mod_base = OTHER; note = 2'-fluoro-adenosine
  modified_base 12: mod_base = OTHER; note = 2'-O-methyl-uridine
  modified_base 13: mod_base = OTHER; note = 2'-O-methyl-guanosine
  modified_base 14: mod_base = OTHER; note = 2'-O-methyl-adenosine
  modified_base 15: mod_base = OTHER; note = 2'-O-methyl-cytidine
  modified_base 16: mod_base = OTHER; note = 2'-O-methyl-adenosine
  modified_base 17: mod_base = OTHER; note = 2'-O-methyl-cytidine
  modified_base 18: mod_base = OTHER; note = 2'-O-methyl-cytidine with phosphorothioate linkage
  modified_base 19: mod_base = OTHER; note = 2'-O-methyl-adenosine with phosphorothioate linkage
  modified_base 20: mod_base = OTHER; note = 2'-O-methyl-adenosine
  modified_base 20: mod_base = OTHER; note = Nucleotide conjugated to 3 iterations of (2R,3R,4R,5S)-5-(3-(5-(((2R,3R,4R,5R,6R)- 3-acetamido-4,5-dihydroxy-6-(hydroxymethyl)tetrahydro-2H-py ran-2-yl)oxy) pentanamido)propyl)-2-((hydroxyl)methyl)-4-methoxytetrahydr ofuran-3-oxyl
ttggtcatccatgacaccaa

SEQ ID NO: 877 - RNA, 20 nt, synthetic construct
  source 1..20: mol_type = other RNA
  modified_base 1: mod_base = OTHER; note = 2'-O-methyl-adenosine with phosphorothioate linkage
  modified_base 2: mod_base = OTHER; note = 2'-O-methyl-cytidine with phosphorothioate linkage
  modified_base 3: mod_base = OTHER; note = 2'-O-methyl-cytidine
  modified_base 4: mod_base = OTHER; note = 2'-O-methyl-cytidine
  modified_base 5: mod_base = OTHER; note = 2'-O-methyl-adenosine
  modified_base 6: mod_base = OTHER; note = 2'-fluoro-adenosine
  modified_base 7: mod_base = OTHER; note = 2'-O-methyl-adenosine
  modified_base 8: mod_base = OTHER; note = 2'-fluoro-uridine
  modified_base 9: mod_base = OTHER; note = 2'-fluoro-guanosine
  modified_base 10: mod_base = OTHER; note = 2'-fluoro-cytidine
  modified_base 11: mod_base = OTHER; note = 2'-fluoro-uridine
  modified_base 12: mod_base = OTHER; note = 2'-O-methyl-guanosine
  modified_base 13: mod_base = OTHER; note = 2'-O-methyl-guanosine
  modified_base 14: mod_base = OTHER; note = 2'-O-methyl-cytidine
  modified_base 15: mod_base = OTHER; note = 2'-O-methyl-uridine
  modified_base 16: mod_base = OTHER; note = 2'-O-methyl-uridine
  modified_base 17: mod_base = OTHER; note = 2'-O-methyl-guanosine
  modified_base 18: mod_base = OTHER; note = 2'-O-methyl-adenosine with phosphorothioate linkage
  modified_base 19: mod_base = OTHER; note = 2'-O-methyl-uridine with phosphorothioate linkage
  modified_base 20: mod_base = OTHER; note = 2'-O-methyl-adenosine
  modified_base 20: mod_base = OTHER; note = Nucleotide conjugated to 3 iterations of (2R,3R,4R,5S)-5-(3-(5-(((2R,3R,4R,5R,6R)- 3-acetamido-4,5-dihydroxy-6-(hydroxymethyl)tetrahydro-2H-py ran-2-yl)oxy) pentanamido)propyl)-2-((hydroxyl)methyl)-4-methoxytetrahydr ofuran-3-oxyl
acccaaatgctggcttgata

SEQ ID NO: 878 - RNA, 20 nt, synthetic construct
  source 1..20: mol_type = other RNA
  modified_base 1: mod_base = OTHER; note = 2'-O-methyl-cytidine with phosphorothioate linkage
  modified_base 2: mod_base = OTHER; note = 2'-O-methyl-adenosine with phosphorothioate linkage
  modified_base 3: mod_base = OTHER; note = 2'-O-methyl-guanosine
  modified_base 4: mod_base = OTHER; note = 2'-O-methyl-guanosine
  modified_base 5: mod_base = OTHER; note = 2'-O-methyl-adenosine
  modified_base 6: mod_base = OTHER; note = 2'-fluoro-uridine
  modified_base 7: mod_base = OTHER; note = 2'-O-methyl-uridine
  modified_base 8: mod_base = OTHER; note = 2'-fluoro-guanosine
  modified_base 9: mod_base = OTHER; note = 2'-fluoro-cytidine
  modified_base 10: mod_base = OTHER; note = 2'-fluoro-uridine
  modified_base 11: mod_base = OTHER; note = 2'-fluoro-adenosine
  modified_base 12: mod_base = OTHER; note = 2'-O-methyl-cytidine
  modified_base 13: mod_base = OTHER; note = 2'-O-methyl-cytidine
  modified_base 14: mod_base = OTHER; note = 2'-O-methyl-adenosine
  modified_base 15: mod_base = OTHER; note = 2'-O-methyl-uridine
  modified_base 16: mod_base = OTHER; note = 2'-O-methyl-guanosine
  modified_base 17: mod_base = OTHER; note = 2'-O-methyl-guanosine
  modified_base 18: mod_base = OTHER; note = 2'-O-methyl-uridine with phosphorothioate linkage
  modified_base 19: mod_base = OTHER; note = 2'-O-methyl-guanosine with phosphorothioate linkage
  modified_base 20: mod_base = OTHER; note = 2'-O-methyl-adenosine
  modified_base 20: mod_base = OTHER; note = Nucleotide conjugated to 3 iterations of (2R,3R,4R,5S)-5-(3-(5-(((2R,3R,4R,5R,6R)- 3-acetamido-4,5-dihydroxy-6-(hydroxymethyl)tetrahydro-2H-py ran-2-yl)oxy) pentanamido)propyl)-2-((hydroxyl)methyl)-4-methoxytetrahydr ofuran-3-oxyl
caggattgctaccatggtga

SEQ ID NO: 879 - RNA, 20 nt, synthetic construct
  source 1..20: mol_type = other RNA
  modified_base 1: mod_base = OTHER; note = 2'-O-methyl-guanosine with phosphorothioate linkage
  modified_base 2: mod_base = OTHER; note = 2'-O-methyl-guanosine with phosphorothioate linkage
  modified_base 3: mod_base = OTHER; note = 2'-O-methyl-cytidine
  modified_base 4: mod_base = OTHER; note = 2'-O-methyl-cytidine
  modified_base 5: mod_base = OTHER; note = 2'-O-methyl-uridine
  modified_base 6: mod_base = OTHER; note = 2'-fluoro-guanosine
  modified_base 7: mod_base = OTHER; note = 2'-O-methyl-adenosine
  modified_base 8: mod_base = OTHER; note = 2'-fluoro-cytidine
  modified_base 9: mod_base = OTHER; note = 2'-fluoro-cytidine
  modified_base 10: mod_base = OTHER; note = 2'-fluoro-adenosine
  modified_base 11: mod_base = OTHER; note = 2'-fluoro-guanosine
  modified_base 12: mod_base = OTHER; note = 2'-O-methyl-guanosine
  modified_base 13: mod_base = OTHER; note = 2'-O-methyl-adenosine
  modified_base 14: mod_base = OTHER; note = 2'-O-methyl-adenosine
  modified_base 15: mod_base = OTHER; note = 2'-O-methyl-cytidine
  modified_base 16: mod_base = OTHER; note = 2'-O-methyl-uridine
  modified_base 17: mod_base = OTHER; note = 2'-O-methyl-adenosine
  modified_base 18: mod_base = OTHER; note = 2'-O-methyl-cytidine with phosphorothioate linkage
  modified_base 19: mod_base = OTHER; note = 2'-O-methyl-uridine with phosphorothioate linkage
  modified_base 20: mod_base = OTHER; note = 2'-O-methyl-adenosine
  modified_base 20: mod_base = OTHER; note = Nucleotide conjugated to 3 iterations of (2R,3R,4R,5S)-5-(3-(5-(((2R,3R,4R,5R,6R)- 3-acetamido-4,5-dihydroxy-6-(hydroxymethyl)tetrahydro-2H-py ran-2-yl)oxy) pentanamido)propyl)-2-((hydroxyl)methyl)-4-methoxytetrahydr ofuran-3-oxyl
ggcctgaccaggaactacta

SEQ ID NO: 880 - RNA, 20 nt, synthetic construct
  source 1..20: mol_type = other RNA
  modified_base 1: mod_base = OTHER; note = 2'-O-methyl-adenosine with phosphorothioate linkage
  modified_base 2: mod_base = OTHER; note = 2'-O-methyl-adenosine with phosphorothioate linkage
  modified_base 3: mod_base = OTHER; note = 2'-O-methyl-guanosine
  modified_base 4: mod_base = OTHER; note = 2'-O-methyl-guanosine
  modified_base 5: mod_base = OTHER; note = 2'-O-methyl-adenosine
  modified_base 6: mod_base = OTHER; note = 2'-fluoro-cytidine
  modified_base 7: mod_base = OTHER; note = 2'-O-methyl-cytidine
  modified_base 8: mod_base = OTHER; note = 2'-fluoro-uridine
  modified_base 9: mod_base = OTHER; note = 2'-fluoro-guanosine
  modified_base 10: mod_base = OTHER; note = 2'-fluoro-cytidine
  modified_base 11: mod_base = OTHER; note = 2'-fluoro-cytidine
  modified_base 12: mod_base = OTHER; note = 2'-O-methyl-adenosine
  modified_base 13: mod_base = OTHER; note = 2'-O-methyl-adenosine
  modified_base 14: mod_base = OTHER; note = 2'-O-methyl-guanosine
  modified_base 15: mod_base = OTHER; note = 2'-O-methyl-cytidine
  modified_base 16: mod_base = OTHER; note = 2'-O-methyl-uridine
  modified_base 17: mod_base = OTHER; note = 2'-O-methyl-uridine
  modified_base 18: mod_base = OTHER; note = 2'-O-methyl-guanosine with phosphorothioate linkage
  modified_base 19: mod_base = OTHER; note = 2'-O-methyl-guanosine with phosphorothioate linkage
  modified_base 20: mod_base = OTHER; note = 2'-O-methyl-adenosine
  modified_base 20: mod_base = OTHER; note = Nucleotide conjugated to 3 iterations of (2R,3R,4R,5S)-5-(3-(5-(((2R,3R,4R,5R,6R)- 3-acetamido-4,5-dihydroxy-6-(hydroxymethyl)tetrahydro-2H-py ran-2-yl)oxy) pentanamido)propyl)-2-((hydroxyl)methyl)-4-methoxytetrahydr ofuran-3-oxyl
aaggacctgccaagcttgga

SEQ ID NO: 881 - RNA, 20 nt, synthetic construct
  source 1..20: mol_type = other RNA
  modified_base 1: mod_base = OTHER; note = 2'-O-methyl-uridine with phosphorothioate linkage
  modified_base 2: mod_base = OTHER; note = 2'-O-methyl-uridine with phosphorothioate linkage
  modified_base 3: mod_base = OTHER; note = 2'-O-methyl-cytidine
  modified_base 4: mod_base = OTHER; note = 2'-O-methyl-cytidine
  modified_base 5: mod_base = OTHER; note = 2'-O-methyl-guanosine
  modified_base 6: mod_base = OTHER; note = 2'-fluoro-adenosine
  modified_base 7: mod_base = OTHER; note = 2'-O-methyl-adenosine
  modified_base 8: mod_base = OTHER; note = 2'-fluoro-cytidine
  modified_base 9: mod_base = OTHER; note = 2'-fluoro-adenosine
  modified_base 10: mod_base = OTHER; note = 2'-fluoro-adenosine
  modified_base 11: mod_base = OTHER; note = 2'-fluoro-guanosine
  modified_base 12: mod_base = OTHER; note = 2'-O-methyl-cytidine
  modified_base 13: mod_base = OTHER; note = 2'-O-methyl-adenosine
  modified_base 14: mod_base = OTHER; note = 2'-O-methyl-cytidine
  modified_base 15: mod_base = OTHER; note = 2'-O-methyl-cytidine
  modified_base 16: mod_base = OTHER; note = 2'-O-methyl-guanosine
  modified_base 17: mod_base = OTHER; note = 2'-O-methyl-adenosine
  modified_base 18: mod_base = OTHER; note = 2'-O-methyl-cytidine with phosphorothioate linkage
  modified_base 19: mod_base = OTHER; note = 2'-O-methyl-uridine with phosphorothioate linkage
  modified_base 20: mod_base = OTHER; note = 2'-O-methyl-adenosine
  modified_base 20: mod_base = OTHER; note = Nucleotide conjugated to 3 iterations of (2R,3R,4R,5S)-5-(3-(5-(((2R,3R,4R,5R,6R)- 3-acetamido-4,5-dihydroxy-6-(hydroxymethyl)tetrahydro-2H-py ran-2-yl)oxy) pentanamido)propyl)-2-((hydroxyl)methyl)-4-methoxytetrahydr ofuran-3-oxyl
ttccgaacaagcaccgacta

SEQ ID NO: 882 - RNA, 20 nt, synthetic construct
  source 1..20: mol_type = other RNA
  modified_base 1: mod_base = OTHER; note = 2'-O-methyl-guanosine with phosphorothioate linkage
  modified_base 2: mod_base = OTHER; note = 2'-O-methyl-guanosine with phosphorothioate linkage
  modified_base 3: mod_base = OTHER; note = 2'-O-methyl-adenosine
  modified_base 4: mod_base = OTHER; note = 2'-O-methyl-guanosine
  modified_base 5: mod_base = OTHER; note = 2'-O-methyl-uridine
  modified_base 6: mod_base = OTHER; note = 2'-fluoro-adenosine
  modified_base 7: mod_base = OTHER; note = 2'-O-methyl-cytidine
  modified_base 8: mod_base = OTHER; note = 2'-fluoro-uridine
  modified_base 9: mod_base = OTHER; note = 2'-fluoro-guanosine
  modified_base 10: mod_base = OTHER; note = 2'-fluoro-cytidine
  modified_base 11: mod_base = OTHER; note = 2'-fluoro-adenosine
  modified_base 12: mod_base = OTHER; note = 2'-O-methyl-adenosine
  modified_base 13: mod_base = OTHER; note = 2'-O-methyl-cytidine
  modified_base 14: mod_base = OTHER; note = 2'-O-methyl-cytidine
  modified_base 15: mod_base = OTHER; note = 2'-O-methyl-uridine
  modified_base 16: mod_base = OTHER; note = 2'-O-methyl-guanosine
  modified_base 17: mod_base = OTHER; note = 2'-O-methyl-adenosine
  modified_base 18: mod_base = OTHER; note = 2'-O-methyl-cytidine with phosphorothioate linkage
  modified_base 19: mod_base = OTHER; note = 2'-O-methyl-guanosine with phosphorothioate linkage
  modified_base 20: mod_base = OTHER; note = 2'-O-methyl-adenosine
  modified_base 20: mod_base = OTHER; note = Nucleotide conjugated to 3 iterations of (2R,3R,4R,5S)-5-(3-(5-(((2R,3R,4R,5R,6R)- 3-acetamido-4,5-dihydroxy-6-(hydroxymethyl)tetrahydro-2H-py ran-2-yl)oxy) pentanamido)propyl)-2-((hydroxyl)methyl)-4-methoxytetrahydr ofuran-3-oxyl
ggagtactgcaacctgacga

SEQ ID NO: 883 - RNA, 20 nt, synthetic construct
  source 1..20: mol_type = other RNA
  modified_base 1: mod_base = OTHER; note = 2'-O-methyl-adenosine with phosphorothioate linkage
  modified_base 2: mod_base = OTHER; note = 2'-O-methyl-cytidine with phosphorothioate linkage
  modified_base 3: mod_base = OTHER; note = 2'-O-methyl-adenosine
  modified_base 4: mod_base = OTHER; note = 2'-O-methyl-guanosine
  modified_base 5: mod_base = OTHER; note = 2'-O-methyl-guanosine
  modified_base 6: mod_base = OTHER; note = 2'-fluoro-adenosine
  modified_base 7: mod_base = OTHER; note = 2'-O-methyl-adenosine
  modified_base 8: mod_base = OTHER; note = 2'-fluoro-guanosine
  modified_base 9: mod_base = OTHER; note = 2'-fluoro-guanosine
  modified_base 10: mod_base = OTHER; note = 2'-fluoro-adenosine
  modified_base 11: mod_base = OTHER; note = 2'-fluoro-cytidine
  modified_base 12: mod_base = OTHER; note = 2'-O-methyl-adenosine
  modified_base 13: mod_base = OTHER; note = 2'-O-methyl-uridine
  modified_base 14: mod_base = OTHER; note = 2'-O-methyl-guanosine
  modified_base 15: mod_base = OTHER; note = 2'-O-methyl-uridine
  modified_base 16: mod_base = OTHER; note = 2'-O-methyl-cytidine
  modified_base 17: mod_base = OTHER; note = 2'-O-methyl-adenosine
  modified_base 18: mod_base = OTHER; note = 2'-O-methyl-guanosine with phosphorothioate linkage
  modified_base 19: mod_base = OTHER; note = 2'-O-methyl-uridine with phosphorothioate linkage
  modified_base 20: mod_base = OTHER; note = 2'-O-methyl-adenosine
  modified_base 20: mod_base = OTHER; note = Nucleotide conjugated to 3 iterations of (2R,3R,4R,5S)-5-(3-(5-(((2R,3R,4R,5R,6R)- 3-acetamido-4,5-dihydroxy-6-(hydroxymethyl)tetrahydro-2H-py ran-2-yl)oxy) pentanamido)propyl)-2-((hydroxyl)methyl)-4-methoxytetrahydr ofuran-3-oxyl
acaggaaggacatgtcagta

SEQ ID NO: 884 - RNA, 20 nt, synthetic construct
  source 1..20: mol_type = other RNA
  modified_base 1: mod_base = OTHER; note = 2'-O-methyl-cytidine with phosphorothioate linkage
  modified_base 2: mod_base = OTHER; note = 2'-O-methyl-adenosine with phosphorothioate linkage
  modified_base 3: mod_base = OTHER; note = 2'-O-methyl-adenosine
  modified_base 4: mod_base = OTHER; note = 2'-O-methyl-guanosine
  modified_base 5: mod_base = OTHER; note = 2'-O-methyl-cytidine
  modified_base 6: mod_base = OTHER; note = 2'-fluoro-adenosine
  modified_base 7: mod_base = OTHER; note = 2'-O-methyl-cytidine
  modified_base 8: mod_base = OTHER; note = 2'-fluoro-cytidine
  modified_base 9: mod_base = OTHER; note = 2'-fluoro-adenosine
  modified_base 10: mod_base = OTHER; note = 2'-fluoro-cytidine
  modified_base 11: mod_base = OTHER; note = 2'-fluoro-cytidine
  modified_base 12: mod_base = OTHER; note = 2'-O-methyl-uridine
  modified_base 13: mod_base = OTHER; note = 2'-O-methyl-guanosine
  modified_base 14: mod_base = OTHER; note = 2'-O-methyl-adenosine
  modified_base 15: mod_base = OTHER; note = 2'-O-methyl-guanosine
  modified_base 16: mod_base = OTHER; note = 2'-O-methyl-adenosine
  modified_base 17: mod_base = OTHER; note = 2'-O-methyl-adenosine
  modified_base 18: mod_base = OTHER; note = 2'-O-methyl-adenosine with phosphorothioate linkage
  modified_base 19: mod_base = OTHER; note = 2'-O-methyl-adenosine with phosphorothioate linkage
  modified_base 20: mod_base = OTHER; note = 2'-O-methyl-adenosine
  modified_base 20: mod_base = OTHER; note = Nucleotide conjugated to 3 iterations of (2R,3R,4R,5S)-5-(3-(5-(((2R,3R,4R,5R,6R)- 3-acetamido-4,5-dihydroxy-6-(hydroxymethyl)tetrahydro-2H-py ran-2-yl)oxy) pentanamido)propyl)-2-((hydroxyl)methyl)-4-methoxytetrahydr ofuran-3-oxyl
caagcaccacctgagaaaaa

SEQ ID NO: 885 - RNA, 20 nt, synthetic construct
  source 1..20: mol_type = other RNA
  modified_base 1: mod_base = OTHER; note = 2'-O-methyl-adenosine with phosphorothioate linkage
  modified_base 2: mod_base = OTHER; note = 2'-O-methyl-cytidine with phosphorothioate linkage
  modified_base 3: mod_base = OTHER; note = 2'-O-methyl-adenosine
  modified_base 4: mod_base = OTHER; note = 2'-O-methyl-cytidine
  modified_base 5: mod_base = OTHER; note = 2'-O-methyl-adenosine
  modified_base 6: mod_base = OTHER; note = 2'-fluoro-adenosine
  modified_base 7: mod_base = OTHER; note = 2'-O-methyl-uridine
  modified_base 8: mod_base = OTHER; note = 2'-fluoro-guanosine
  modified_base 9: mod_base = OTHER; note = 2'-fluoro-cytidine
  modified_base 10: mod_base = OTHER; note = 2'-fluoro-uridine
  modified_base 11: mod_base = OTHER; note = 2'-fluoro-cytidine
  modified_base 12: mod_base = OTHER; note = 2'-O-methyl-adenosine
  modified_base 13: mod_base = OTHER; note = 2'-O-methyl-guanosine
  modified_base 14: mod_base = OTHER; note = 2'-O-methyl-adenosine
  modified_base 15: mod_base = OTHER; note = 2'-O-methyl-cytidine
  modified_base 16: mod_base = OTHER; note = 2'-O-methyl-guanosine
  modified_base 17: mod_base = OTHER; note = 2'-O-methyl-cytidine
  modified_base 18: mod_base = OTHER; note = 2'-O-methyl-adenosine with phosphorothioate linkage
  modified_base 19: mod_base = OTHER; note = 2'-O-methyl-guanosine with phosphorothioate linkage
  modified_base 20: mod_base = OTHER; note = 2'-O-methyl-adenosine
  modified_base 20: mod_base = OTHER; note = Nucleotide conjugated to 3 iterations of (2R,3R,4R,5S)-5-(3-(5-(((2R,3R,4R,5R,6R)- 3-acetamido-4,5-dihydroxy-6-(hydroxymethyl)tetrahydro-2H-py ran-2-yl)oxy) pentanamido)propyl)-2-((hydroxyl)methyl)-4-methoxytetrahydr ofuran-3-oxyl
acacaatgctcagacgcaga

SEQ ID NO: 886 - RNA, 20 nt, synthetic construct
  source 1..20: mol_type = other RNA
  modified_base 1: mod_base = OTHER; note = 2'-O-methyl-guanosine with phosphorothioate linkage
  modified_base 2: mod_base = OTHER; note = 2'-O-methyl-guanosine with phosphorothioate linkage
  modified_base 3: mod_base = OTHER; note = 2'-O-methyl-adenosine
  modified_base 4: mod_base = OTHER; note = 2'-O-methyl-adenosine
  modified_base 5: mod_base = OTHER; note = 2'-O-methyl-guanosine
  modified_base 6: mod_base = OTHER; note = 2'-fluoro-guanosine
  modified_base 7: mod_base = OTHER; note = 2'-O-methyl-adenosine
  modified_base 8: mod_base = OTHER; note = 2'-fluoro-cytidine
  modified_base 9: mod_base = OTHER; note = 2'-fluoro-adenosine
  modified_base 10: mod_base = OTHER; note = 2'-fluoro-uridine
  modified_base 11: mod_base = OTHER; note = 2'-fluoro-guanosine
  modified_base 12: mod_base = OTHER; note = 2'-O-methyl-uridine
  modified_base 13: mod_base = OTHER; note = 2'-O-methyl-cytidine
  modified_base 14: mod_base = OTHER; note = 2'-O-methyl-adenosine
  modified_base 15: mod_base = OTHER; note = 2'-O-methyl-guanosine
  modified_base 16: mod_base = OTHER; note = 2'-O-methyl-uridine
  modified_base 17: mod_base = OTHER; note = 2'-O-methyl-cytidine
  modified_base 18: mod_base = OTHER; note = 2'-O-methyl-uridine with phosphorothioate linkage
  modified_base 19: mod_base = OTHER; note = 2'-O-methyl-uridine with phosphorothioate linkage
  modified_base 20: mod_base = OTHER; note = 2'-O-methyl-adenosine
  modified_base 20: mod_base = OTHER; note = Nucleotide conjugated to 3 iterations of (2R,3R,4R,5S)-5-(3-(5-(((2R,3R,4R,5R,6R)- 3-acetamido-4,5-dihydroxy-6-(hydroxymethyl)tetrahydro-2H-py ran-2-yl)oxy) pentanamido)propyl)-2-((hydroxyl)methyl)-4-methoxytetrahydr ofuran-3-oxyl
ggaaggacatgtcagtctta

SEQ ID NO: 887 - RNA, 20 nt, synthetic construct
  source 1..20: mol_type = other RNA
  modified_base 1: mod_base = OTHER; note = 2'-O-methyl-guanosine with phosphorothioate linkage
  modified_base 2: mod_base = OTHER; note = 2'-O-methyl-uridine with phosphorothioate linkage
  modified_base 3: mod_base = OTHER; note = 2'-O-methyl-guanosine
  modified_base 4: mod_base = OTHER; note = 2'-O-methyl-guanosine
  modified_base 5: mod_base = OTHER; note = 2'-O-methyl-cytidine
  modified_base 6: mod_base = OTHER; note = 2'-fluoro-adenosine
  modified_base 7: mod_base = OTHER; note = 2'-O-methyl-guanosine
  modified_base 8: mod_base = OTHER; note = 2'-fluoro-cytidine
  modified_base 9: mod_base = OTHER; note = 2'-fluoro-cytidine
  modified_base 10: mod_base = OTHER; note = 2'-fluoro-cytidine
  modified_base 11: mod_base = OTHER; note = 2'-fluoro-cytidine
  modified_base 12: mod_base = OTHER; note = 2'-O-methyl-uridine
  modified_base 13: mod_base = OTHER; note = 2'-O-methyl-uridine
  modified_base 14: mod_base = OTHER; note = 2'-O-methyl-adenosine
  modified_base 15: mod_base = OTHER; note = 2'-O-methyl-uridine
  modified_base 16: mod_base = OTHER; note = 2'-O-methyl-uridine
  modified_base 17: mod_base = OTHER; note = 2'-O-methyl-guanosine
  modified_base 18: mod_base = OTHER; note = 2'-O-methyl-uridine with phosphorothioate linkage
  modified_base 19: mod_base = OTHER; note = 2'-O-methyl-uridine with phosphorothioate linkage
  modified_base 20: mod_base = OTHER; note = 2'-O-methyl-adenosine
  modified_base 20: mod_base = OTHER; note = Nucleotide conjugated to 3 iterations of (2R,3R,4R,5S)-5-(3-(5-(((2R,3R,4R,5R,6R)- 3-acetamido-4,5-dihydroxy-6-(hydroxymethyl)tetrahydro-2H-py ran-2-yl)oxy) pentanamido)propyl)-2-((hydroxyl)methyl)-4-methoxytetrahydr ofuran-3-oxyl
gtggcagccccttattgtta

SEQ ID NO: 888 - RNA, 20 nt, synthetic construct
  source 1..20: mol_type = other RNA
  modified_base 1: mod_base = OTHER; note = 2'-O-methyl-guanosine with phosphorothioate linkage
  modified_base 2: mod_base = OTHER; note = 2'-O-methyl-adenosine with phosphorothioate linkage
  modified_base 3: mod_base = OTHER; note = 2'-O-methyl-guanosine
  modified_base 4: mod_base = OTHER; note = 2'-O-methyl-adenosine
  modified_base 5: mod_base = OTHER; note = 2'-O-methyl-uridine
  modified_base 6: mod_base = OTHER; note = 2'-fluoro-uridine
  modified_base 7: mod_base = OTHER; note = 2'-O-methyl-cytidine
  modified_base 8: mod_base = OTHER; note = 2'-fluoro-guanosine
  modified_base 9: mod_base = OTHER; note = 2'-fluoro-cytidine
  modified_base 10: mod_base = OTHER; note = 2'-fluoro-cytidine
  modified_base 11: mod_base = OTHER; note = 2'-fluoro-cytidine
  modified_base 12: mod_base = OTHER; note = 2'-O-methyl-uridine
  modified_base 13: mod_base = OTHER; note = 2'-O-methyl-uridine
  modified_base 14: mod_base = OTHER; note = 2'-O-methyl-guanosine
  modified_base 15: mod_base = OTHER; note = 2'-O-methyl-guanosine
  modified_base 16: mod_base = OTHER; note = 2'-O-methyl-uridine
  modified_base 17: mod_base = OTHER; note = 2'-O-methyl-guanosine
  modified_base 18: mod_base = OTHER; note = 2'-O-methyl-uridine with phosphorothioate linkage
  modified_base 19: mod_base = OTHER; note = 2'-O-methyl-uridine with phosphorothioate linkage
  modified_base 20: mod_base = OTHER; note = 2'-O-methyl-adenosine
  modified_base 20: mod_base = OTHER; note = Nucleotide conjugated to 3 iterations of (2R,3R,4R,5S)-5-(3-(5-(((2R,3R,4R,5R,6R)- 3-acetamido-4,5-dihydroxy-6-(hydroxymethyl)tetrahydro-2H-py ran-2-yl)oxy) pentanamido)propyl)-2-((hydroxyl)methyl)-4-methoxytetrahydr ofuran-3-oxyl
gagattcgcccttggtgtta

SEQ ID NO: 889 - RNA, 20 nt, synthetic construct
  source 1..20: mol_type = other RNA
  modified_base 1: mod_base = OTHER; note = 2'-O-methyl-guanosine with phosphorothioate linkage
  modified_base 2: mod_base = OTHER; note = 2'-O-methyl-uridine with phosphorothioate linkage
  modified_base 3: mod_base = OTHER; note = 2'-O-methyl-cytidine
  modified_base 4: mod_base = OTHER; note = 2'-O-methyl-adenosine
  modified_base 5: mod_base = OTHER; note = 2'-O-methyl-guanosine
  modified_base 6: mod_base = OTHER; note = 2'-fluoro-adenosine
  modified_base 7: mod_base = OTHER; note = 2'-O-methyl-uridine
  modified_base 8: mod_base = OTHER; note = 2'-fluoro-guanosine
  modified_base 9: mod_base = OTHER; note = 2'-fluoro-guanosine
  modified_base 10: mod_base = OTHER; note = 2'-fluoro-guanosine
  modified_base 11: mod_base = OTHER; note = 2'-fluoro-adenosine
  modified_base 12: mod_base = OTHER; note = 2'-O-methyl-guanosine
  modified_base 13: mod_base = OTHER; note = 2'-O-methyl-uridine
  modified_base 14: mod_base = OTHER; note = 2'-O-methyl-adenosine
  modified_base 15: mod_base = OTHER; note = 2'-O-methyl-cytidine
  modified_base 16: mod_base = OTHER; note = 2'-O-methyl-uridine
  modified_base 17: mod_base = OTHER; note = 2'-O-methyl-guanosine
  modified_base 18: mod_base = OTHER; note = 2'-O-methyl-cytidine with phosphorothioate linkage
  modified_base 19: mod_base = OTHER; note = 2'-O-methyl-adenosine with phosphorothioate linkage
  modified_base 20: mod_base = OTHER; note = 2'-O-methyl-adenosine
  modified_base 20: mod_base = OTHER; note = Nucleotide conjugated to 3 iterations of (2R,3R,4R,5S)-5-(3-(5-(((2R,3R,4R,5R,6R)- 3-acetamido-4,5-dihydroxy-6-(hydroxymethyl)tetrahydro-2H-py ran-2-yl)oxy) pentanamido)propyl)-2-((hydroxyl)methyl)-4-methoxytetrahydr ofuran-3-oxyl
gtcagatgggagtactgcaa

SEQ ID NO: 890 - RNA, 20 nt, synthetic construct
  source 1..20: mol_type = other RNA
  modified_base 1: mod_base = OTHER; note = 2'-O-methyl-uridine with phosphorothioate linkage
  modified_base 2: mod_base = OTHER; note = 2'-O-methyl-guanosine with phosphorothioate linkage
  modified_base 3: mod_base = OTHER; note = 2'-O-methyl-adenosine
  modified_base 4: mod_base = OTHER; note = 2'-O-methyl-cytidine
  modified_base 5: mod_base = OTHER; note = 2'-O-methyl-cytidine
  modified_base 6: mod_base = OTHER; note = 2'-fluoro-adenosine
  modified_base 7: mod_base = OTHER; note = 2'-O-methyl-guanosine
  modified_base 8: mod_base = OTHER; note = 2'-fluoro-guanosine
  modified_base 9: mod_base = OTHER; note = 2'-fluoro-adenosine
  modified_base 10: mod_base = OTHER; note = 2'-fluoro-adenosine
  modified_base 11: mod_base = OTHER; note = 2'-fluoro-cytidine
  modified_base 12: mod_base = OTHER; note = 2'-O-methyl-uridine
  modified_base 13: mod_base = OTHER; note = 2'-O-methyl-adenosine
  modified_base 14: mod_base = OTHER; note = 2'-O-methyl-cytidine
  modified_base 15: mod_base = OTHER; note = 2'-O-methyl-uridine
  modified_base 16: mod_base = OTHER; note = 2'-O-methyl-guanosine
  modified_base 17: mod_base = OTHER; note = 2'-O-methyl-cytidine
  modified_base 18: mod_base = OTHER; note = 2'-O-methyl-adenosine with phosphorothioate linkage
  modified_base 19: mod_base = OTHER; note = 2'-O-methyl-guanosine with phosphorothioate linkage
  modified_base 20: mod_base = OTHER; note = 2'-O-methyl-adenosine
  modified_base 20: mod_base = OTHER; note = Nucleotide conjugated to 3 iterations of (2R,3R,4R,5S)-5-(3-(5-(((2R,3R,4R,5R,6R)- 3-acetamido-4,5-dihydroxy-6-(hydroxymethyl)tetrahydro-2H-py ran-2-yl)oxy) pentanamido)propyl)-2-((hydroxyl)methyl)-4-methoxytetrahydr ofuran-3-oxyl
tgaccaggaactactgcaga

SEQ ID NO: 891 - RNA, 20 nt, synthetic construct
  source 1..20: mol_type = other RNA
  modified_base 1: mod_base = OTHER; note = 2'-O-methyl-cytidine with phosphorothioate linkage
  modified_base 2: mod_base = OTHER; note = 2'-O-methyl-uridine with phosphorothioate linkage
  modified_base 3: mod_base = OTHER; note = 2'-O-methyl-guanosine
  modified_base 4: mod_base = OTHER; note = 2'-O-methyl-adenosine
  modified_base 5: mod_base = OTHER; note = 2'-O-methyl-adenosine
  modified_base 6: mod_base = OTHER; note = 2'-fluoro-guanosine
  modified_base 7: mod_base = OTHER; note = 2'-O-methyl-adenosine
  modified_base 8: mod_base = OTHER; note = 2'-fluoro-adenosine
  modified_base 9: mod_base = OTHER; note = 2'-fluoro-guanosine
  modified_base 10: mod_base = OTHER; note = 2'-fluoro-cytidine
  modified_base 11: mod_base = OTHER; note = 2'-fluoro-adenosine
  modified_base 12: mod_base = OTHER; note = 2'-O-methyl-cytidine
  modified_base 13: mod_base = OTHER; note = 2'-O-methyl-cytidine
  modified_base 14: mod_base = OTHER; note = 2'-O-methyl-adenosine
  modified_base 15: mod_base = OTHER; note = 2'-O-methyl-adenosine
  modified_base 16: mod_base = OTHER; note = 2'-O-methyl-cytidine
  modified_base 17: mod_base = OTHER; note = 2'-O-methyl-uridine
  modified_base 18: mod_base = OTHER; note = 2'-O-methyl-guanosine with phosphorothioate linkage
  modified_base 19: mod_base = OTHER; note = 2'-O-methyl-adenosine with phosphorothioate linkage
  modified_base 20: mod_base = OTHER; note = 2'-O-methyl-adenosine
  modified_base 20: mod_base = OTHER; note = Nucleotide conjugated to 3 iterations of (2R,3R,4R,5S)-5-(3-(5-(((2R,3R,4R,5R,6R)- 3-acetamido-4,5-dihydroxy-6-(hydroxymethyl)tetrahydro-2H-py ran-2-yl)oxy) pentanamido)propyl)-2-((hydroxyl)methyl)-4-methoxytetrahydr ofuran-3-oxyl
ctgaagaagcaccaactgaa

SEQ ID NO: 892 - RNA, 20 nt, synthetic construct
  source 1..20: mol_type = other RNA
  modified_base 1: mod_base = OTHER; note = 2'-O-methyl-cytidine with phosphorothioate linkage
  modified_base 2: mod_base = OTHER; note = 2'-O-methyl-adenosine with phosphorothioate linkage
  modified_base 3: mod_base = OTHER; note = 2'-O-methyl-guanosine
  modified_base 4: mod_base = OTHER; note = 2'-O-methyl-uridine
  modified_base 5: mod_base = OTHER; note = 2'-O-methyl-guanosine
  modified_base 6: mod_base = OTHER; note = 2'-fluoro-uridine
  modified_base 7: mod_base = OTHER; note = 2'-O-methyl-cytidine
  modified_base 8: mod_base = OTHER; note = 2'-fluoro-adenosine
  modified_base 9: mod_base = OTHER; note = 2'-fluoro-guanosine
  modified_base 10: mod_base = OTHER; note = 2'-fluoro-guanosine
  modified_base 11: mod_base = OTHER; note = 2'-fluoro-uridine
  modified_base 12: mod_base = OTHER; note = 2'-O-methyl-guanosine
  modified_base 13: mod_base = OTHER; note = 2'-O-methyl-guanosine
  modified_base 14: mod_base = OTHER; note = 2'-O-methyl-guanosine
  modified_base 15: mod_base = OTHER; note = 2'-O-methyl-adenosine
  modified_base 16: mod_base = OTHER; note = 2'-O-methyl-guanosine
  modified_base 17: mod_base = OTHER; note = 2'-O-methyl-uridine
  modified_base 18: mod_base = OTHER; note = 2'-O-methyl-adenosine with phosphorothioate linkage
  modified_base 19: mod_base = OTHER; note = 2'-O-methyl-cytidine with phosphorothioate linkage
  modified_base 20: mod_base = OTHER; note = 2'-O-methyl-adenosine
  modified_base 20: mod_base = OTHER; note = Nucleotide conjugated to 3 iterations of (2R,3R,4R,5S)-5-(3-(5-(((2R,3R,4R,5R,6R)- 3-acetamido-4,5-dihydroxy-6-(hydroxymethyl)tetrahydro-2H-py ran-2-yl)oxy) pentanamido)propyl)-2-((hydroxyl)methyl)-4-methoxytetrahydr ofuran-3-oxyl
cagtgtcaggtgggagtaca

SEQ ID NO: 893 - RNA, 20 nt, synthetic construct
  source 1..20: mol_type = other RNA
  modified_base 1: mod_base = OTHER; note = 2'-O-methyl-guanosine with phosphorothioate linkage
  modified_base 2: mod_base = OTHER; note = 2'-O-methyl-adenosine with phosphorothioate linkage
  modified_base 3: mod_base = OTHER; note = 2'-O-methyl-uridine
  modified_base 4: mod_base = OTHER; note = 2'-O-methyl-guanosine
  modified_base 5: mod_base = OTHER; note = 2'-O-methyl-guanosine
  modified_base 6: mod_base = OTHER; note = 2'-fluoro-guanosine
  modified_base 7: mod_base = OTHER; note = 2'-O-methyl-adenosine
  modified_base 8: mod_base = OTHER; note = 2'-fluoro-guanosine
  modified_base 9: mod_base = OTHER; note = 2'-fluoro-uridine
  modified_base 10: mod_base = OTHER; note = 2'-fluoro-adenosine
  modified_base 11: mod_base = OTHER; note = 2'-fluoro-cytidine
  modified_base 12: mod_base = OTHER; note = 2'-O-methyl-uridine
  modified_base 13: mod_base = OTHER; note = 2'-O-methyl-guanosine
  modified_base 14: mod_base = OTHER; note = 2'-O-methyl-cytidine
  modified_base 15: mod_base = OTHER; note = 2'-O-methyl-adenosine
  modified_base 16: mod_base = OTHER; note = 2'-O-methyl-adenosine
  modified_base 17: mod_base = OTHER; note = 2'-O-methyl-cytidine
  modified_base 18: mod_base = OTHER; note = 2'-O-methyl-cytidine with phosphorothioate linkage
  modified_base 19: mod_base = OTHER; note = 2'-O-methyl-uridine with phosphorothioate linkage
  modified_base 20: mod_base = OTHER; note = 2'-O-methyl-adenosine
  modified_base 20: mod_base = OTHER; note = Nucleotide conjugated to 3 iterations of (2R,3R,4R,5S)-5-(3-(5-(((2R,3R,4R,5R,6R)- 3-acetamido-4,5-dihydroxy-6-(hydroxymethyl)tetrahydro-2H-py ran-2-yl)oxy) pentanamido)propyl)-2-((hydroxyl)methyl)-4-methoxytetrahydr ofuran-3-oxyl
gatgggagtactgcaaccta

SEQ ID NO: 894 - RNA, 20 nt, synthetic construct
  source 1..20: mol_type = other RNA
  modified_base 1: mod_base = OTHER; note = 2'-O-methyl-guanosine with phosphorothioate linkage
  modified_base 2: mod_base = OTHER; note = 2'-O-methyl-adenosine with phosphorothioate linkage
  modified_base 3: mod_base = OTHER; note = 2'-O-methyl-uridine
  modified_base 4: mod_base = OTHER; note = 2'-O-methyl-guanosine
  modified_base 5: mod_base = OTHER; note = 2'-O-methyl-guanosine
  modified_base 6: mod_base = OTHER; note = 2'-fluoro-adenosine
  modified_base 7: mod_base = OTHER; note = 2'-O-methyl-cytidine
  modified_base 8: mod_base = OTHER; note = 2'-fluoro-adenosine
  modified_base 9: mod_base = OTHER; note = 2'-fluoro-guanosine
  modified_base 10: mod_base = OTHER; note = 2'-fluoro-adenosine
  modified_base 11: mod_base = OTHER; note = 2'-fluoro-guanosine
  modified_base 12: mod_base = OTHER; note = 2'-O-methyl-uridine
  modified_base 13: mod_base = OTHER; note = 2'-O-methyl-uridine
  modified_base 14: mod_base = OTHER; note = 2'-O-methyl-adenosine
  modified_base 15: mod_base = OTHER; note = 2'-O-methyl-uridine
  modified_base 16: mod_base = OTHER; note = 2'-O-methyl-cytidine
  modified_base 17: mod_base = OTHER; note = 2'-O-methyl-guanosine
  modified_base 18: mod_base = OTHER; note = 2'-O-methyl-adenosine with phosphorothioate linkage
  modified_base 19: mod_base = OTHER; note = 2'-O-methyl-guanosine with phosphorothioate linkage
  modified_base 20: mod_base = OTHER; note = 2'-O-methyl-adenosine
  modified_base 20: mod_base = OTHER; note = Nucleotide conjugated to 3 iterations of (2R,3R,4R,5S)-5-(3-(5-(((2R,3R,4R,5R,6R)- 3-acetamido-4,5-dihydroxy-6-(hydroxymethyl)tetrahydro-2H-py ran-2-yl)oxy) pentanamido)propyl)-2-((hydroxyl)methyl)-4-methoxytetrahydr ofuran-3-oxyl
gatggacagagttatcgaga

SEQ ID NO: 895 - RNA, 20 nt, synthetic construct
  source 1..20: mol_type = other RNA
  modified_base 1: mod_base = OTHER; note = 2'-O-methyl-guanosine with phosphorothioate linkage
  modified_base 2: mod_base = OTHER; note = 2'-O-methyl-adenosine with phosphorothioate linkage
  modified_base 3: mod_base = OTHER; note = 2'-O-methyl-adenosine
  modified_base 4: mod_base = OTHER; note = 2'-O-methyl-guanosine
  modified_base 5: mod_base = OTHER; note = 2'-O-methyl-guanosine
  modified_base 6: mod_base = OTHER; note = 2'-fluoro-adenosine
  modified_base 7: mod_base = OTHER; note = 2'-O-methyl-cytidine
  modified_base 8: mod_base = OTHER; note = 2'-fluoro-adenosine
  modified_base 9: mod_base = OTHER; note = 2'-fluoro-uridine
  modified_base 10: mod_base = OTHER; note = 2'-fluoro-guanosine
  modified_base 11: mod_base = OTHER; note = 2'-fluoro-uridine
  modified_base 12: mod_base = OTHER; note = 2'-O-methyl-cytidine
  modified_base 13: mod_base = OTHER; note = 2'-O-methyl-adenosine
  modified_base 14: mod_base = OTHER; note = 2'-O-methyl-guanosine
  modified_base 15: mod_base = OTHER; note = 2'-O-methyl-uridine
  modified_base 16: mod_base = OTHER; note = 2'-O-methyl-cytidine
  modified_base 17: mod_base = OTHER; note = 2'-O-methyl-uridine
  modified_base 18: mod_base = OTHER; note = 2'-O-methyl-uridine with phosphorothioate linkage
  modified_base 19: mod_base = OTHER; note = 2'-O-methyl-guanosine with phosphorothioate linkage
  modified_base 20: mod_base = OTHER; note = 2'-O-methyl-adenosine
  modified_base 20: mod_base = OTHER; note = Nucleotide conjugated to 3 iterations of (2R,3R,4R,5S)-5-(3-(5-(((2R,3R,4R,5R,6R)- 3-acetamido-4,5-dihydroxy-6-(hydroxymethyl)tetrahydro-2H-py ran-2-yl)oxy) pentanamido)propyl)-2-((hydroxyl)methyl)-4-methoxytetrahydr ofuran-3-oxyl
gaaggacatgtcagtcttga

SEQ ID NO: 896 - RNA, 20 nt, synthetic construct
  source 1..20: mol_type = other RNA
  modified_base 1: mod_base = OTHER; note = 2'-O-methyl-uridine with phosphorothioate linkage
  modified_base 2: mod_base = OTHER; note = 2'-O-methyl-cytidine with phosphorothioate linkage
  modified_base 3: mod_base = OTHER; note = 2'-O-methyl-cytidine
  modified_base 4: mod_base = OTHER; note = 2'-O-methyl-adenosine
  modified_base 5: mod_base = OTHER; note = 2'-O-methyl-guanosine
  modified_base 6: mod_base = OTHER; note = 2'-fluoro-uridine
  modified_base 7: mod_base = OTHER; note = 2'-O-methyl-guanosine
  modified_base 8: mod_base = OTHER; note = 2'-fluoro-adenosine
  modified_base 9: mod_base = OTHER; note = 2'-fluoro-cytidine
  modified_base 10: mod_base = OTHER; note = 2'-fluoro-adenosine
  modified_base 11: mod_base = OTHER; note = 2'-fluoro-guanosine
  modified_base 12: mod_base = OTHER; note = 2'-O-methyl-adenosine
  modified_base 13: mod_base = OTHER; note = 2'-O-methyl-adenosine
  modified_base 14: mod_base = OTHER; note = 2'-O-methyl-uridine
  modified_base 15: mod_base = OTHER; note = 2'-O-methyl-cytidine
  modified_base 16: mod_base = OTHER; note = 2'-O-methyl-adenosine
  modified_base 17: mod_base = OTHER; note = 2'-O-methyl-adenosine
  modified_base 18: mod_base = OTHER; note = 2'-O-methyl-guanosine with phosphorothioate linkage
  modified_base 19: mod_base = OTHER; note = 2'-O-methyl-uridine with phosphorothioate linkage
  modified_base 20: mod_base = OTHER; note = 2'-O-methyl-adenosine
  modified_base 20: mod_base = OTHER; note = Nucleotide conjugated to 3 iterations of (2R,3R,4R,5S)-5-(3-(5-(((2R,3R,4R,5R,6R)- 3-acetamido-4,5-dihydroxy-6-(hydroxymethyl)tetrahydro-2H-py ran-2-yl)oxy) pentanamido)propyl)-2-((hydroxyl)methyl)-4-methoxytetrahydr ofuran-3-oxyl
tccagtgacagaatcaagta

SEQ ID NO: 897 - RNA, 20 nt, synthetic construct
  source 1..20: mol_type = other RNA
  modified_base 1: mod_base = OTHER; note = 2'-O-methyl-cytidine with phosphorothioate linkage
  modified_base 2: mod_base = OTHER; note = 2'-O-methyl-adenosine with phosphorothioate linkage
  modified_base 3: mod_base = OTHER; note = 2'-O-methyl-guanosine
  modified_base 4: mod_base = OTHER; note = 2'-O-methyl-adenosine
  modified_base 5: mod_base = OTHER; note = 2'-O-methyl-guanosine
  modified_base 6: mod_base = OTHER; note = 2'-fluoro-guanosine
  modified_base 7: mod_base = OTHER; note = 2'-O-methyl-adenosine
  modified_base 8: mod_base = OTHER; note = 2'-fluoro-cytidine
  modified_base 9: mod_base = OTHER; note = 2'-fluoro-adenosine
  modified_base 10: mod_base = OTHER; note = 2'-fluoro-adenosine
  modified_base 11: mod_base = OTHER; note = 2'-fluoro-cytidine
  modified_base 12: mod_base = OTHER; note = 2'-O-methyl-adenosine
  modified_base 13: mod_base = OTHER; note = 2'-O-methyl-guanosine
  modified_base 14: mod_base = OTHER; note = 2'-O-methyl-adenosine
  modified_base 15: mod_base = OTHER; note = 2'-O-methyl-adenosine
  modified_base 16: mod_base = OTHER; note = 2'-O-methyl-uridine
  modified_base 17: mod_base = OTHER; note = 2'-O-methyl-adenosine
  modified_base 18: mod_base = OTHER; note = 2'-O-methyl-uridine with phosphorothioate linkage
  modified_base 19: mod_base = OTHER; note = 2'-O-methyl-uridine with phosphorothioate linkage
  modified_base 20: mod_base = OTHER; note = 2'-O-methyl-adenosine
  modified_base 20: mod_base = OTHER; note = Nucleotide conjugated to 3 iterations of (2R,3R,4R,5S)-5-(3-(5-(((2R,3R,4R,5R,6R)- 3-acetamido-4,5-dihydroxy-6-(hydroxymethyl)tetrahydro-2H-py ran-2-yl)oxy) pentanamido)propyl)-2-((hydroxyl)methyl)-4-methoxytetrahydr ofuran-3-oxyl
cagaggacaacagaatatta

SEQ ID NO: 898 - RNA, 20 nt, synthetic construct
  source 1..20: mol_type = other RNA
  modified_base 1: mod_base = OTHER; note = 2'-O-methyl-cytidine with phosphorothioate linkage
  modified_base 2: mod_base = OTHER; note = 2'-O-methyl-adenosine with phosphorothioate linkage
  modified_base 3: mod_base = OTHER; note = 2'-O-methyl-guanosine
  modified_base 4: mod_base = OTHER; note = 2'-O-methyl-cytidine
  modified_base 5: mod_base = OTHER; note = 2'-O-methyl-cytidine
  modified_base 6: mod_base = OTHER; note = 2'-fluoro-cytidine
  modified_base 7: mod_base = OTHER; note = 2'-O-methyl-cytidine
  modified_base 8: mod_base = OTHER; note = 2'-fluoro-uridine
  modified_base 9: mod_base = OTHER; note = 2'-fluoro-uridine
  modified_base 10: mod_base = OTHER; note = 2'-fluoro-adenosine
  modified_base 11: mod_base = OTHER; note = 2'-fluoro-uridine
  modified_base 12: mod_base = OTHER; note = 2'-O-methyl-uridine
  modified_base 13: mod_base = OTHER; note = 2'-O-methyl-guanosine
  modified_base 14: mod_base = OTHER; note = 2'-O-methyl-uridine
  modified_base 15: mod_base = OTHER; note = 2'-O-methyl-uridine
  modified_base 16: mod_base = OTHER; note = 2'-O-methyl-adenosine
  modified_base 17: mod_base = OTHER; note = 2'-O-methyl-uridine
  modified_base 18: mod_base = OTHER; note = 2'-O-methyl-adenosine with phosphorothioate linkage
  modified_base 19: mod_base = OTHER; note = 2'-O-methyl-cytidine with phosphorothioate linkage
  modified_base 20: mod_base = OTHER; note = 2'-O-methyl-adenosine
  modified_base 20: mod_base = OTHER; note = Nucleotide conjugated to 3 iterations of (2R,3R,4R,5S)-5-(3-(5-(((2R,3R,4R,5R,6R)- 3-acetamido-4,5-dihydroxy-6-(hydroxymethyl)tetrahydro-2H-py ran-2-yl)oxy) pentanamido)propyl)-2-((hydroxyl)methyl)-4-methoxytetrahydr ofuran-3-oxyl
cagccccttattgttataca

SEQ ID NO: 899 - RNA, 20 nt, synthetic construct
  source 1..20: mol_type = other RNA
  modified_base 1: mod_base = OTHER; note = 2'-O-methyl-uridine with phosphorothioate linkage
  modified_base 2: mod_base = OTHER; note = 2'-O-methyl-adenosine with phosphorothioate linkage
  modified_base 3: mod_base = OTHER; note = 2'-O-methyl-cytidine
  modified_base 4: mod_base = OTHER; note = 2'-O-methyl-cytidine
  modified_base 5: mod_base = OTHER; note = 2'-O-methyl-cytidine
  modified_base 6: mod_base = OTHER; note = 2'-fluoro-adenosine
  modified_base 7: mod_base = OTHER; note = 2'-O-methyl-adenosine
  modified_base 8: mod_base = OTHER; note = 2'-fluoro-adenosine
  modified_base 9: mod_base = OTHER; note = 2'-fluoro-uridine
  modified_base 10: mod_base = OTHER; note = 2'-fluoro-guanosine
  modified_base 11: mod_base = OTHER; note = 2'-fluoro-guanosine
  modified_base 12: mod_base = OTHER; note = 2'-O-methyl-uridine
  modified_base 13: mod_base = OTHER; note = 2'-O-methyl-guanosine
  modified_base 14: mod_base = OTHER; note = 2'-O-methyl-guanosine
  modified_base 15: mod_base = OTHER; note = 2'-O-methyl-cytidine
  modified_base 16: mod_base = OTHER; note = 2'-O-methyl-cytidine
  modified_base 17: mod_base = OTHER; note = 2'-O-methyl-uridine
  modified_base 18: mod_base = OTHER; note = 2'-O-methyl-guanosine with phosphorothioate linkage
  modified_base 19: mod_base = OTHER; note = 2'-O-methyl-adenosine with phosphorothioate linkage
  modified_base 20: mod_base = OTHER; note = 2'-O-methyl-adenosine
  modified_base 20: mod_base = OTHER; note = Nucleotide conjugated to 3 iterations of (2R,3R,4R,5S)-5-(3-(5-(((2R,3R,4R,5R,6R)- 3-acetamido-4,5-dihydroxy-6-(hydroxymethyl)tetrahydro-2H-py ran-2-yl)oxy) pentanamido)propyl)-2-((hydroxyl)methyl)-4-methoxytetrahydr ofuran-3-oxyl
tacccaaatggtggcctgaa

SEQ ID NO: 900 - RNA, 20 nt, synthetic construct
  source 1..20: mol_type = other RNA
  modified_base 1: mod_base = OTHER; note = 2'-O-methyl-guanosine with phosphorothioate linkage
  modified_base 2: mod_base = OTHER; note = 2'-O-methyl-adenosine with phosphorothioate linkage
  modified_base 3: mod_base = OTHER; note = 2'-O-methyl-guanosine
  modified_base 4: mod_base = OTHER; note = 2'-O-methyl-guanosine
  modified_base 5: mod_base = OTHER; note = 2'-O-methyl-adenosine
  modified_base 6: mod_base = OTHER; note = 2'-fluoro-cytidine
  modified_base 7: mod_base = OTHER; note = 2'-O-methyl-adenosine
  modified_base 8: mod_base = OTHER; note = 2'-fluoro-adenosine
  modified_base 9: mod_base = OTHER; note = 2'-fluoro-cytidine
  modified_base 10: mod_base = OTHER; note = 2'-fluoro-adenosine
  modified_base 11: mod_base = OTHER; note = 2'-fluoro-guanosine
  modified_base 12: mod_base = OTHER; note = 2'-O-methyl-adenosine
  modified_base 13: mod_base = OTHER; note = 2'-O-methyl-adenosine
  modified_base 14: mod_base = OTHER; note = 2'-O-methyl-uridine
  modified_base 15: mod_base = OTHER; note = 2'-O-methyl-adenosine
  modified_base 16: mod_base = OTHER; note = 2'-O-methyl-uridine
  modified_base 17: mod_base = OTHER; note = 2'-O-methyl-uridine
  modified_base 18: mod_base = OTHER; note = 2'-O-methyl-adenosine with phosphorothioate linkage
  modified_base 19: mod_base = OTHER; note = 2'-O-methyl-uridine with phosphorothioate linkage
  modified_base 20: mod_base = OTHER; note = 2'-O-methyl-adenosine
  modified_base 20: mod_base = OTHER; note = Nucleotide conjugated to 3 iterations of (2R,3R,4R,5S)-5-(3-(5-(((2R,3R,4R,5R,6R)- 3-acetamido-4,5-dihydroxy-6-(hydroxymethyl)tetrahydro-2H-py ran-2-yl)oxy) pentanamido)propyl)-2-((hydroxyl)methyl)-4-methoxytetrahydr ofuran-3-oxyl
gaggacaacagaatattata

SEQ ID NO: 901 - RNA, 20 nt, synthetic construct
  source 1..20: mol_type = other RNA
  modified_base 1: mod_base = OTHER; note = 2'-O-methyl-cytidine with phosphorothioate linkage
  modified_base 2: mod_base = OTHER; note = 2'-O-methyl-adenosine with phosphorothioate linkage
  modified_base 3: mod_base = OTHER; note = 2'-O-methyl-guanosine
  modified_base 4: mod_base = OTHER; note = 2'-O-methyl-adenosine
  modified_base 5: mod_base = OTHER; note = 2'-O-methyl-guanosine
  modified_base 6: mod_base = OTHER; note = 2'-fluoro-uridine
  modified_base 7: mod_base = OTHER; note = 2'-O-methyl-uridine
  modified_base 8: mod_base = OTHER; note = 2'-fluoro-adenosine
  modified_base 9: mod_base = OTHER; note = 2'-fluoro-uridine
  modified_base 10: mod_base = OTHER; note = 2'-fluoro-cytidine
  modified_base 11: mod_base = OTHER; note = 2'-fluoro-guanosine
  modified_base 12: mod_base = OTHER; note = 2'-O-methyl-adenosine
  modified_base 13: mod_base = OTHER; note = 2'-O-methyl-guanosine
  modified_base 14: mod_base = OTHER; note = 2'-O-methyl-guanosine
  modified_base 15: mod_base = OTHER; note = 2'-O-methyl-cytidine
  modified_base 16: mod_base = OTHER; note = 2'-O-methyl-uridine
  modified_base 17: mod_base = OTHER; note = 2'-O-methyl-cytidine
  modified_base 18: mod_base = OTHER; note = 2'-O-methyl-adenosine with phosphorothioate linkage
  modified_base 19: mod_base = OTHER; note = 2'-O-methyl-uridine with phosphorothioate linkage
  modified_base 20: mod_base = OTHER; note = 2'-O-methyl-adenosine
  modified_base 20: mod_base = OTHER; note = Nucleotide conjugated to 3 iterations of (2R,3R,4R,5S)-5-(3-(5-(((2R,3R,4R,5R,6R)- 3-acetamido-4,5-dihydroxy-6-(hydroxymethyl)tetrahydro-2H-py ran-2-yl)oxy) pentanamido)propyl)-2-((hydroxyl)methyl)-4-methoxytetrahydr ofuran-3-oxyl
cagagttatcgaggctcata

SEQ ID NO: 902 - RNA, 20 nt, synthetic construct
  source 1..20: mol_type = other RNA
  modified_base 1: mod_base = OTHER; note = 2'-O-methyl-cytidine with phosphorothioate linkage
  modified_base 2: mod_base = OTHER; note = 2'-O-methyl-cytidine with phosphorothioate linkage
  modified_base 3: mod_base = OTHER; note = 2'-O-methyl-cytidine
  modified_base 4: mod_base = OTHER; note = 2'-O-methyl-guanosine
  modified_base 5: mod_base = OTHER; note = 2'-O-methyl-guanosine
  modified_base 6: mod_base = OTHER; note = 2'-fluoro-uridine
  modified_base 7: mod_base = OTHER; note = 2'-O-methyl-uridine
  modified_base 8: mod_base = OTHER; note = 2'-fluoro-cytidine
  modified_base 9: mod_base = OTHER; note = 2'-fluoro-cytidine
  modified_base 10: mod_base = OTHER; note = 2'-fluoro-adenosine
  modified_base 11: mod_base = OTHER; note = 2'-fluoro-adenosine
  modified_base 12: mod_base = OTHER; note = 2'-O-methyl-guanosine
  modified_base 13: mod_base = OTHER; note = 2'-O-methyl-cytidine
  modified_base 14: mod_base = OTHER; note = 2'-O-methyl-cytidine
  modified_base 15: mod_base = OTHER; note = 2'-O-methyl-uridine
  modified_base 16: mod_base = OTHER; note = 2'-O-methyl-adenosine
  modified_base 17: mod_base = OTHER; note = 2'-O-methyl-guanosine
  modified_base 18: mod_base = OTHER; note = 2'-O-methyl-adenosine with phosphorothioate linkage
  modified_base 19: mod_base = OTHER; note = 2'-O-methyl-guanosine with phosphorothioate linkage
  modified_base 20: mod_base = OTHER; note = 2'-O-methyl-adenosine
  modified_base 20: mod_base = OTHER; note = Nucleotide conjugated to 3 iterations of (2R,3R,4R,5S)-5-(3-(5-(((2R,3R,4R,5R,6R)- 3-acetamido-4,5-dihydroxy-6-(hydroxymethyl)tetrahydro-2H-py ran-2-yl)oxy) pentanamido)propyl)-2-((hydroxyl)methyl)-4-methoxytetrahydr ofuran-3-oxyl
cccggttccaagcctagaga

SEQ ID NO: 903 - RNA, 20 nt, synthetic construct
  source 1..20: mol_type = other RNA
  modified_base 1: mod_base = OTHER; note = 2'-O-methyl-adenosine with phosphorothioate linkage
  modified_base 2: mod_base = OTHER; note = 2'-O-methyl-guanosine with phosphorothioate linkage
  modified_base 3: mod_base = OTHER; note = 2'-O-methyl-guanosine
  modified_base 4: mod_base = OTHER; note = 2'-O-methyl-adenosine
  modified_base 5: mod_base = OTHER; note = 2'-O-methyl-cytidine
  modified_base 6: mod_base = OTHER; note = 2'-fluoro-adenosine
  modified_base 7: mod_base = OTHER; note = 2'-O-methyl-adenosine
  modified_base 8: mod_base = OTHER; note = 2'-fluoro-cytidine
  modified_base 9: mod_base = OTHER; note = 2'-fluoro-adenosine
  modified_base 10: mod_base = OTHER; note = 2'-fluoro-guanosine
  modified_base 11: mod_base = OTHER; note = 2'-fluoro-adenosine
  modified_base 12: mod_base = OTHER; note = 2'-O-methyl-adenosine
  modified_base 13: mod_base = OTHER; note = 2'-O-methyl-uridine
  modified_base 14: mod_base = OTHER; note = 2'-O-methyl-adenosine
  modified_base 15: mod_base = OTHER; note = 2'-O-methyl-uridine
  modified_base 16: mod_base = OTHER; note = 2'-O-methyl-uridine
  modified_base 17: mod_base = OTHER; note = 2'-O-methyl-adenosine
  modified_base 18: mod_base = OTHER; note = 2'-O-methyl-uridine with phosphorothioate linkage
  modified_base 19: mod_base = OTHER; note = 2'-O-methyl-cytidine with phosphorothioate linkage
  modified_base 20: mod_base = OTHER; note = 2'-O-methyl-adenosine
  modified_base 20: mod_base = OTHER; note = Nucleotide conjugated to 3 iterations of (2R,3R,4R,5S)-5-(3-(5-(((2R,3R,4R,5R,6R)- 3-acetamido-4,5-dihydroxy-6-(hydroxymethyl)tetrahydro-2H-py ran-2-yl)oxy) pentanamido)propyl)-2-((hydroxyl)methyl)-4-methoxytetrahydr ofuran-3-oxyl
aggacaacagaatattatca

SEQ ID NO: 904 - RNA, 20 nt, synthetic construct
  source 1..20: mol_type = other RNA
  modified_base 1: mod_base = OTHER; note = 2'-O-methyl-guanosine with phosphorothioate linkage
  modified_base 2: mod_base = OTHER; note = 2'-O-methyl-uridine with phosphorothioate linkage
  modified_base 3: mod_base = OTHER; note = 2'-O-methyl-cytidine
  modified_base 4: mod_base = OTHER; note = 2'-O-methyl-adenosine
  modified_base 5: mod_base = OTHER; note = 2'-O-methyl-guanosine
  modified_base 6: mod_base = OTHER; note = 2'-fluoro-guanosine
  modified_base 7: mod_base = OTHER; note = 2'-O-methyl-uridine
  modified_base 8: mod_base = OTHER; note = 2'-fluoro-guanosine
  modified_base 9: mod_base = OTHER; note = 2'-fluoro-guanosine
  modified_base 10: mod_base = OTHER; note = 2'-fluoro-guanosine
  modified_base 11: mod_base = OTHER; note = 2'-fluoro-adenosine
  modified_base 12: mod_base = OTHER; note = 2'-O-methyl-guanosine
  modified_base 13: mod_base = OTHER; note = 2'-O-methyl-uridine
  modified_base 14: mod_base = OTHER; note = 2'-O-methyl-adenosine
  modified_base 15: mod_base = OTHER; note = 2'-O-methyl-cytidine
  modified_base 16: mod_base = OTHER; note = 2'-O-methyl-uridine
  modified_base 17: mod_base = OTHER; note = 2'-O-methyl-guanosine
  modified_base 18: mod_base = OTHER; note = 2'-O-methyl-cytidine with phosphorothioate linkage
  modified_base 19: mod_base = OTHER; note = 2'-O-methyl-adenosine with phosphorothioate linkage
  modified_base 20: mod_base = OTHER; note = 2'-O-methyl-adenosine
  modified_base 20: mod_base = OTHER; note = Nucleotide conjugated to 3 iterations of (2R,3R,4R,5S)-5-(3-(5-(((2R,3R,4R,5R,6R)- 3-acetamido-4,5-dihydroxy-6-(hydroxymethyl)tetrahydro-2H-py ran-2-yl)oxy) pentanamido)propyl)-2-((hydroxyl)methyl)-4-methoxytetrahydr ofuran-3-oxyl
gtcaggtgggagtactgcaa

SEQ ID NO: 905 - RNA, 20 nt, synthetic construct
  source 1..20: mol_type = other RNA
  modified_base 1: mod_base = OTHER; note = 2'-O-methyl-uridine with phosphorothioate linkage
  modified_base 2: mod_base = OTHER; note = 2'-O-methyl-guanosine with phosphorothioate linkage
  modified_base 3: mod_base = OTHER; note = 2'-O-methyl-uridine
  modified_base 4: mod_base = OTHER; note = 2'-O-methyl-cytidine
  modified_base 5: mod_base = OTHER; note = 2'-O-methyl-adenosine
  modified_base 6: mod_base = OTHER; note = 2'-fluoro-cytidine
  modified_base 7: mod_base = OTHER; note = 2'-O-methyl-adenosine
  modified_base 8: mod_base = OTHER; note = 2'-fluoro-guanosine
  modified_base 9: mod_base = OTHER; note = 2'-fluoro-guanosine
  modified_base 10: mod_base = OTHER; note = 2'-fluoro-adenosine
  modified_base 11: mod_base = OTHER; note = 2'-fluoro-adenosine
  modified_base 12: mod_base = OTHER; note = 2'-O-methyl-guanosine
  modified_base 13: mod_base = OTHER; note = 2'-O-methyl-guanosine
  modified_base 14: mod_base = OTHER; note = 2'-O-methyl-adenosine
  modified_base 15: mod_base = OTHER; note = 2'-O-methyl-cytidine
  modified_base 16: mod_base = OTHER; note = 2'-O-methyl-adenosine
  modified_base 17: mod_base = OTHER; note = 2'-O-methyl-uridine
  modified_base 18: mod_base = OTHER; note = 2'-O-methyl-guanosine with phosphorothioate linkage
  modified_base 19: mod_base = OTHER; note = 2'-O-methyl-uridine with phosphorothioate linkage
  modified_base 20: mod_base = OTHER; note = 2'-O-methyl-adenosine
  modified_base 20: mod_base = OTHER; note = Nucleotide conjugated to 3 iterations of (2R,3R,4R,5S)-5-(3-(5-(((2R,3R,4R,5R,6R)- 3-acetamido-4,5-dihydroxy-6-(hydroxymethyl)tetrahydro-2H-py ran-2-yl)oxy) pentanamido)propyl)-2-((hydroxyl)methyl)-4-methoxytetrahydr ofuran-3-oxyl
tgtcacaggaaggacatgta

SEQ ID NO: 906 - RNA, 20 nt, synthetic construct
  source 1..20: mol_type = other RNA
  modified_base 1: mod_base = OTHER; note = 2'-O-methyl-cytidine with phosphorothioate linkage
  modified_base 2: mod_base = OTHER; note = 2'-O-methyl-uridine with phosphorothioate linkage
  modified_base 3: mod_base = OTHER; note = 2'-O-methyl-guanosine
  modified_base 4: mod_base = OTHER; note = 2'-O-methyl-uridine
  modified_base 5: mod_base = OTHER; note = 2'-O-methyl-guanosine
  modified_base 6: mod_base = OTHER; note = 2'-fluoro-guanosine
  modified_base 7: mod_base = OTHER; note = 2'-O-methyl-cytidine
  modified_base 8: mod_base = OTHER; note = 2'-fluoro-adenosine
  modified_base 9: mod_base = OTHER; note = 2'-fluoro-guanosine
  modified_base 10: mod_base = OTHER; note = 2'-fluoro-cytidine
  modified_base 11: mod_base = OTHER; note = 2'-fluoro-cytidine
  modified_base 12: mod_base = OTHER; note = 2'-O-methyl-cytidine
  modified_base 13: mod_base = OTHER; note = 2'-O-methyl-cytidine
  modified_base 14: mod_base = OTHER; note = 2'-O-methyl-uridine
  modified_base 15: mod_base = OTHER; note = 2'-O-methyl-uridine
  modified_base 16: mod_base = OTHER; note = 2'-O-methyl-adenosine
  modified_base 17: mod_base = OTHER; note = 2'-O-methyl-uridine
  modified_base 18: mod_base = OTHER; note = 2'-O-methyl-uridine with phosphorothioate linkage
  modified_base 19: mod_base = OTHER; note = 2'-O-methyl-guanosine with phosphorothioate linkage
  modified_base 20: mod_base = OTHER; note = 2'-O-methyl-adenosine
  modified_base 20: mod_base = OTHER; note = Nucleotide conjugated to 3 iterations of (2R,3R,4R,5S)-5-(3-(5-(((2R,3R,4R,5R,6R)- 3-acetamido-4,5-dihydroxy-6-(hydroxymethyl)tetrahydro-2H-py ran-2-yl)oxy) pentanamido)propyl)-2-((hydroxyl)methyl)-4-methoxytetrahydr ofuran-3-oxyl
ctgtggcagccccttattga

SEQ ID NO: 907 - RNA, 20 nt, synthetic construct
  source 1..20: mol_type = other RNA
  modified_base 1: mod_base = OTHER; note = 2'-O-methyl-guanosine with phosphorothioate linkage
  modified_base 2: mod_base = OTHER; note = 2'-O-methyl-guanosine with phosphorothioate linkage
  modified_base 3: mod_base = OTHER; note = 2'-O-methyl-uridine
  modified_base 4: mod_base = OTHER; note = 2'-O-methyl-cytidine
  modified_base 5: mod_base = OTHER; note = 2'-O-methyl-cytidine
  modified_base 6: mod_base = OTHER; note = 2'-fluoro-uridine
  modified_base 7: mod_base = OTHER; note = 2'-O-methyl-cytidine
  modified_base 8: mod_base = OTHER; note = 2'-fluoro-uridine
  modified_base 9: mod_base = OTHER; note = 2'-fluoro-adenosine
  modified_base 10: mod_base = OTHER; note = 2'-fluoro-uridine
  modified_base 11: mod_base = OTHER; note = 2'-fluoro-guanosine
  modified_base 12: mod_base = OTHER; note = 2'-O-methyl-adenosine
  modified_base 13: mod_base = OTHER; note = 2'-O-methyl-cytidine
  modified_base 14: mod_base = OTHER; note = 2'-O-methyl-adenosine
  modified_base 15: mod_base = OTHER; note = 2'-O-methyl-cytidine
  modified_base 16: mod_base = OTHER; note = 2'-O-methyl-cytidine
  modified_base 17: mod_base = OTHER; note = 2'-O-methyl-adenosine
  modified_base 18: mod_base = OTHER; note = 2'-O-methyl-cytidine with phosphorothioate linkage
  modified_base 19: mod_base = OTHER; note = 2'-O-methyl-adenosine with phosphorothioate linkage
  modified_base 20: mod_base = OTHER; note = 2'-O-methyl-adenosine
  modified_base 20: mod_base = OTHER; note = Nucleotide conjugated to 3 iterations of (2R,3R,4R,5S)-5-(3-(5-(((2R,3R,4R,5R,6R)- 3-acetamido-4,5-dihydroxy-6-(hydroxymethyl)tetrahydro-2H-py ran-2-yl)oxy) pentanamido)propyl)-2-((hydroxyl)methyl)-4-methoxytetrahydr ofuran-3-oxyl
ggtcctctatgacaccacaa

SEQ ID NO: 908 - RNA, 20 nt, synthetic construct
  source 1..20: mol_type = other RNA
  modified_base 1: mod_base = OTHER; note = 2'-O-methyl-uridine with phosphorothioate linkage
  modified_base 2: mod_base = OTHER; note = 2'-O-methyl-cytidine with phosphorothioate linkage
  modified_base 3: mod_base = OTHER; note = 2'-O-methyl-uridine
  modified_base 4: mod_base = OTHER; note = 2'-O-methyl-guanosine
  modified_base 5: mod_base = OTHER; note = 2'-O-methyl-adenosine
  modified_base 6: mod_base = OTHER; note = 2'-fluoro-adenosine
  modified_base 7: mod_base = OTHER; note = 2'-O-methyl-guanosine
  modified_base 8: mod_base = OTHER; note = 2'-fluoro-adenosine
  modified_base 9: mod_base = OTHER; note = 2'-fluoro-adenosine
  modified_base 10: mod_base = OTHER; note = 2'-fluoro-guanosine
  modified_base 11: mod_base = OTHER; note = 2'-fluoro-cytidine
  modified_base 12: mod_base = OTHER; note = 2'-O-methyl-adenosine
  modified_base 13: mod_base = OTHER; note = 2'-O-methyl-cytidine
  modified_base 14: mod_base = OTHER; note = 2'-O-methyl-cytidine
  modified_base 15: mod_base = OTHER; note = 2'-O-methyl-adenosine
  modified_base 16: mod_base = OTHER; note = 2'-O-methyl-adenosine
  modified_base 17: mod_base = OTHER; note = 2'-O-methyl-cytidine
  modified_base 18: mod_base = OTHER; note = 2'-O-methyl-guanosine with phosphorothioate linkage
  modified_base 19: mod_base = OTHER; note = 2'-O-methyl-guanosine with phosphorothioate linkage
  modified_base 20: mod_base = OTHER; note = 2'-O-methyl-adenosine
  modified_base 20: mod_base = OTHER; note = Nucleotide conjugated to 3 iterations of (2R,3R,4R,5S)-5-(3-(5-(((2R,3R,4R,5R,6R)- 3-acetamido-4,5-dihydroxy-6-(hydroxymethyl)tetrahydro-2H-py ran-2-yl)oxy) pentanamido)propyl)-2-((hydroxyl)methyl)-4-methoxytetrahydr ofuran-3-oxyl
tctgaagaagcaccaacgga

SEQ ID NO: 909 - RNA, 20 nt, synthetic construct
  source 1..20: mol_type = other RNA
  modified_base 1: mod_base = OTHER; note = 2'-O-methyl-adenosine with phosphorothioate linkage
  modified_base 2: mod_base = OTHER; note = 2'-O-methyl-guanosine with phosphorothioate linkage
  modified_base 3: mod_base = OTHER; note = 2'-O-methyl-guanosine
  modified_base 4: mod_base = OTHER; note = 2'-O-methyl-adenosine
  modified_base 5: mod_base = OTHER; note = 2'-O-methyl-cytidine
  modified_base 6: mod_base = OTHER; note = 2'-fluoro-adenosine
  modified_base 7: mod_base = OTHER; note = 2'-O-methyl-uridine
  modified_base 8: mod_base = OTHER; note = 2'-fluoro-guanosine
  modified_base 9: mod_base = OTHER; note = 2'-fluoro-uridine
  modified_base 10: mod_base = OTHER; note = 2'-fluoro-cytidine
  modified_base 11: mod_base = OTHER; note = 2'-fluoro-adenosine
  modified_base 12: mod_base = OTHER; note = 2'-O-methyl-guanosine
  modified_base 13: mod_base = OTHER; note = 2'-O-methyl-uridine
  modified_base 14: mod_base = OTHER; note = 2'-O-methyl-cytidine
  modified_base 15: mod_base = OTHER; note = 2'-O-methyl-uridine
  modified_base 16: mod_base = OTHER; note = 2'-O-methyl-uridine
  modified_base 17: mod_base = OTHER; note = 2'-O-methyl-guanosine
  modified_base 18: mod_base = OTHER; note = 2'-O-methyl-guanosine with phosphorothioate linkage
  modified_base 19: mod_base = OTHER; note = 2'-O-methyl-uridine with phosphorothioate linkage
  modified_base 20: mod_base = OTHER; note = 2'-O-methyl-adenosine
  modified_base 20: mod_base = OTHER; note = Nucleotide conjugated to 3 iterations of (2R,3R,4R,5S)-5-(3-(5-(((2R,3R,4R,5R,6R)- 3-acetamido-4,5-dihydroxy-6-(hydroxymethyl)tetrahydro-2H-py ran-2-yl)oxy) pentanamido)propyl)-2-((hydroxyl)methyl)-4-methoxytetrahydr ofuran-3-oxyl
aggacatgtcagtcttggta

SEQ ID NO: 910 - RNA, 20 nt, synthetic construct
  source 1..20: mol_type = other RNA
  modified_base 1: mod_base = OTHER; note = 2'-O-methyl-adenosine with phosphorothioate linkage
  modified_base 2: mod_base = OTHER; note = 2'-O-methyl-guanosine with phosphorothioate linkage
  modified_base 3: mod_base = OTHER; note = 2'-O-methyl-uridine
  modified_base 4: mod_base = OTHER; note = 2'-O-methyl-uridine
  modified_base 5: mod_base = OTHER; note = 2'-O-methyl-adenosine
  modified_base 6: mod_base = OTHER; note = 2'-fluoro-uridine
  modified_base 7: mod_base = OTHER; note = 2'-O-methyl-cytidine
  modified_base 8: mod_base = OTHER; note = 2'-fluoro-guanosine
  modified_base 9: mod_base = OTHER; note = 2'-fluoro-adenosine
  modified_base 10: mod_base = OTHER; note = 2'-fluoro-guanosine
  modified_base 11: mod_base = OTHER; note = 2'-fluoro-guanosine
  modified_base 12: mod_base = OTHER; note = 2'-O-methyl-cytidine
  modified_base 13: mod_base = OTHER; note = 2'-O-methyl-uridine
  modified_base 14: mod_base = OTHER; note = 2'-O-methyl-cytidine
  modified_base 15: mod_base = OTHER; note = 2'-O-methyl-adenosine
  modified_base 16: mod_base = OTHER; note = 2'-O-methyl-uridine
  modified_base 17: mod_base = OTHER; note = 2'-O-methyl-uridine
  modified_base 18: mod_base = OTHER; note = 2'-O-methyl-cytidine with phosphorothioate linkage
  modified_base 19: mod_base = OTHER; note = 2'-O-methyl-uridine with phosphorothioate linkage
  modified_base 20: mod_base = OTHER; note = 2'-O-methyl-adenosine
  modified_base 20: mod_base = OTHER; note = Nucleotide conjugated to 3 iterations of (2R,3R,4R,5S)-5-(3-(5-(((2R,3R,4R,5R,6R)- 3-acetamido-4,5-dihydroxy-6-(hydroxymethyl)tetrahydro-2H-py ran-2-yl)oxy) pentanamido)propyl)-2-((hydroxyl)methyl)-4-methoxytetrahydr ofuran-3-oxyl
agttatcgaggctcattcta

SEQ ID NO: 911 - RNA, 20 nt, synthetic construct
  source 1..20: mol_type = other RNA
  modified_base 1: mod_base = OTHER; note = 2'-O-methyl-adenosine with phosphorothioate linkage
  modified_base 2: mod_base = OTHER; note = 2'-O-methyl-cytidine with phosphorothioate linkage
  modified_base 3: mod_base = OTHER; note = 2'-O-methyl-adenosine
  modified_base 4: mod_base = OTHER; note = 2'-O-methyl-guanosine
  modified_base 5: mod_base = OTHER; note = 2'-O-methyl-guanosine
  modified_base 6: mod_base = OTHER; note = 2'-fluoro-adenosine
  modified_base 7: mod_base = OTHER; note = 2'-O-methyl-adenosine
  modified_base 8: mod_base = OTHER; note = 2'-fluoro-guanosine
  modified_base 9: mod_base = OTHER; note = 2'-fluoro-adenosine
  modified_base 10: mod_base = OTHER; note = 2'-fluoro-adenosine
  modified_base 11: mod_base = OTHER; note = 2'-fluoro-cytidine
  modified_base 12: mod_base = OTHER; note = 2'-O-methyl-cytidine
  modified_base 13: mod_base = OTHER; note = 2'-O-methyl-uridine
  modified_base 14: mod_base = OTHER; note = 2'-O-methyl-guanosine
  modified_base 15: mod_base = OTHER; note = 2'-O-methyl-cytidine
  modified_base 16: mod_base = OTHER; note = 2'-O-methyl-cytidine
  modified_base 17: mod_base = OTHER; note = 2'-O-methyl-adenosine
  modified_base 18: mod_base = OTHER; note = 2'-O-methyl-adenosine with phosphorothioate linkage
  modified_base 19: mod_base = OTHER; note = 2'-O-methyl-guanosine with phosphorothioate linkage
  modified_base 20: mod_base = OTHER; note = 2'-O-methyl-adenosine
  modified_base 20: mod_base = OTHER; note = Nucleotide conjugated to 3 iterations of (2R,3R,4R,5S)-5-(3-(5-(((2R,3R,4R,5R,6R)- 3-acetamido-4,5-dihydroxy-6-(hydroxymethyl)tetrahydro-2H-py ran-2-yl)oxy) pentanamido)propyl)-2-((hydroxyl)methyl)-4-methoxytetrahydr ofuran-3-oxyl
acaggaagaacctgccaaga

SEQ ID NO: 912 - RNA, 20 nt, synthetic construct
  source 1..20: mol_type = other RNA
  modified_base 1: mod_base = OTHER; note = 2'-O-methyl-adenosine with phosphorothioate linkage
  modified_base 2: mod_base = OTHER; note = 2'-O-methyl-adenosine with phosphorothioate linkage
  modified_base 3: mod_base = OTHER; note = 2'-O-methyl-guanosine
  modified_base 4: mod_base = OTHER; note = 2'-O-methyl-adenosine
  modified_base 5: mod_base = OTHER; note = 2'-O-methyl-adenosine
  modified_base 6: mod_base = OTHER; note = 2'-fluoro-guanosine
  modified_base 7: mod_base = OTHER; note = 2'-O-methyl-cytidine
  modified_base 8: mod_base = OTHER; note = 2'-fluoro-adenosine
  modified_base 9: mod_base = OTHER; note = 2'-fluoro-cytidine
  modified_base 10: mod_base = OTHER; note = 2'-fluoro-cytidine
  modified_base 11: mod_base = OTHER; note = 2'-fluoro-adenosine
  modified_base 12: mod_base = OTHER; note = 2'-O-methyl-adenosine
  modified_base 13: mod_base = OTHER; note = 2'-O-methyl-cytidine
  modified_base 14: mod_base = OTHER; note = 2'-O-methyl-guanosine
  modified_base 15: mod_base = OTHER; note = 2'-O-methyl-guanosine
  modified_base 16: mod_base = OTHER; note = 2'-O-methyl-adenosine
  modified_base 17: mod_base = OTHER; note = 2'-O-methyl-guanosine
  modified_base 18: mod_base = OTHER; note = 2'-O-methyl-cytidine with phosphorothioate linkage
  modified_base 19: mod_base = OTHER; note = 2'-O-methyl-adenosine with phosphorothioate linkage
  modified_base 20: mod_base = OTHER; note = 2'-O-methyl-adenosine
  modified_base 20: mod_base = OTHER; note = Nucleotide conjugated to 3 iterations of (2R,3R,4R,5S)-5-(3-(5-(((2R,3R,4R,5R,6R)- 3-acetamido-4,5-dihydroxy-6-(hydroxymethyl)tetrahydro-2H-py ran-2-yl)oxy) pentanamido)propyl)-2-((hydroxyl)methyl)-4-methoxytetrahydr ofuran-3-oxyl
aagaagcaccaacggagcaa

SEQ ID NO: 913 - RNA, 20 nt, synthetic construct
  source 1..20: mol_type = other RNA
  modified_base 1: mod_base = OTHER; note = 2'-O-methyl-cytidine with phosphorothioate linkage
  modified_base 2: mod_base = OTHER; note = 2'-O-methyl-adenosine with phosphorothioate linkage
  modified_base 3: mod_base = OTHER; note = 2'-O-methyl-uridine
  modified_base 4: mod_base = OTHER; note = 2'-O-methyl-cytidine
  modified_base 5: mod_base = OTHER; note = 2'-O-methyl-adenosine
  modified_base 6: mod_base = OTHER; note = 2'-fluoro-guanosine
  modified_base 7: mod_base = OTHER; note = 2'-O-methyl-adenosine
  modified_base 8: mod_base = OTHER; note = 2'-fluoro-guanosine
  modified_base 9: mod_base = OTHER; note = 2'-fluoro-guanosine
  modified_base 10: mod_base = OTHER; note = 2'-fluoro-adenosine
  modified_base 11: mod_base = OTHER; note = 2'-fluoro-cytidine
  modified_base 12: mod_base = OTHER; note = 2'-O-methyl-adenosine
  modified_base 13: mod_base = OTHER; note = 2'-O-methyl-adenosine
  modified_base 14: mod_base = OTHER; note = 2'-O-methyl-cytidine
  modified_base 15: mod_base = OTHER; note = 2'-O-methyl-adenosine
  modified_base 16: mod_base = OTHER; note = 2'-O-methyl-guanosine
  modified_base 17: mod_base = OTHER; note = 2'-O-methyl-adenosine
  modified_base 18: mod_base = OTHER; note = 2'-O-methyl-adenosine with phosphorothioate linkage
  modified_base 19: mod_base = OTHER; note = 2'-O-methyl-uridine with phosphorothioate linkage
  modified_base 20: mod_base = OTHER; note = 2'-O-methyl-adenosine
  modified_base 20: mod_base = OTHER; note = Nucleotide conjugated to 3 iterations of (2R,3R,4R,5S)-5-(3-(5-(((2R,3R,4R,5R,6R)- 3-acetamido-4,5-dihydroxy-6-(hydroxymethyl)tetrahydro-2H-py ran-2-yl)oxy) pentanamido)propyl)-2-((hydroxyl)methyl)-4-methoxytetrahydr ofuran-3-oxyl
catcagaggacaacagaata

SEQ ID NO: 914 - RNA, 20 nt, synthetic construct
  source 1..20: mol_type = other RNA
  modified_base 1: mod_base = OTHER; note = 2'-O-methyl-guanosine with phosphorothioate linkage
  modified_base 2: mod_base = OTHER; note = 2'-O-methyl-guanosine with phosphorothioate linkage
  modified_base 3: mod_base = OTHER; note = 2'-O-methyl-adenosine
  modified_base 4: mod_base = OTHER; note = 2'-O-methyl-adenosine
  modified_base 5: mod_base = OTHER; note = 2'-O-methyl-guanosine
  modified_base 6: mod_base = OTHER; note = 2'-fluoro-adenosine
  modified_base 7: mod_base = OTHER; note = 2'-O-methyl-adenosine
  modified_base 8: mod_base = OTHER; note = 2'-fluoro-cytidine
  modified_base 9: mod_base = OTHER; note = 2'-fluoro-uridine
  modified_base 10: mod_base = OTHER; note = 2'-fluoro-uridine
  modified_base 11: mod_base = OTHER; note = 2'-fluoro-guanosine
  modified_base 12: mod_base = OTHER; note = 2'-O-methyl-cytidine
  modified_base 13: mod_base = OTHER; note = 2'-O-methyl-cytidine
  modified_base 14: mod_base = OTHER; note = 2'-O-methyl-adenosine
  modified_base 15: mod_base = OTHER; note = 2'-O-methyl-adenosine
  modified_base 16: mod_base = OTHER; note = 2'-O-methyl-guanosine
  modified_base 17: mod_base = OTHER; note = 2'-O-methyl-cytidine
  modified_base 18: mod_base = OTHER; note = 2'-O-methyl-uridine with phosphorothioate linkage
  modified_base 19: mod_base = OTHER; note = 2'-O-methyl-uridine with phosphorothioate linkage
  modified_base 20: mod_base = OTHER; note = 2'-O-methyl-adenosine
  modified_base 20: mod_base = OTHER; note = Nucleotide conjugated to 3 iterations of (2R,3R,4R,5S)-5-(3-(5-(((2R,3R,4R,5R,6R)- 3-acetamido-4,5-dihydroxy-6-(hydroxymethyl)tetrahydro-2H-py ran-2-yl)oxy) pentanamido)propyl)-2-((hydroxyl)methyl)-4-methoxytetrahydr ofuran-3-oxyl
ggaagaacttgccaagctta

SEQ ID NO: 915 - RNA, 20 nt, synthetic construct
  source 1..20: mol_type = other RNA
  modified_base 1: mod_base = OTHER; note = 2'-O-methyl-cytidine with phosphorothioate linkage
  modified_base 2: mod_base = OTHER; note = 2'-O-methyl-uridine with phosphorothioate linkage
  modified_base 3: mod_base = OTHER; note = 2'-O-methyl-adenosine
  modified_base 4: mod_base = OTHER; note = 2'-O-methyl-cytidine
  modified_base 5: mod_base = OTHER; note = 2'-O-methyl-cytidine
  modified_base 6: mod_base = OTHER; note = 2'-fluoro-adenosine
  modified_base 7: mod_base = OTHER; note = 2'-O-methyl-uridine
  modified_base 8: mod_base = OTHER; note = 2'-fluoro-guanosine
  modified_base 9: mod_base = OTHER; note = 2'-fluoro-guanosine
  modified_base 10: mod_base = OTHER; note = 2'-fluoro-uridine
  modified_base 11: mod_base = OTHER; note = 2'-fluoro-guanosine
  modified_base 12: mod_base = OTHER; note = 2'-O-methyl-adenosine
  modified_base 13: mod_base = OTHER; note = 2'-O-methyl-uridine
  modified_base 14: mod_base = OTHER; note = 2'-O-methyl-guanosine
  modified_base 15: mod_base = OTHER; note = 2'-O-methyl-guanosine
  modified_base 16: mod_base = OTHER; note = 2'-O-methyl-adenosine
  modified_base 17: mod_base = OTHER; note = 2'-O-methyl-cytidine
  modified_base 18: mod_base = OTHER; note = 2'-O-methyl-adenosine with phosphorothioate linkage
  modified_base 19: mod_base = OTHER; note = 2'-O-methyl-guanosine with phosphorothioate linkage
  modified_base 20: mod_base = OTHER; note = 2'-O-methyl-adenosine
  modified_base 20: mod_base = OTHER; note = Nucleotide conjugated to 3 iterations of (2R,3R,4R,5S)-5-(3-(5-(((2R,3R,4R,5R,6R)- 3-acetamido-4,5-dihydroxy-6-(hydroxymethyl)tetrahydro-2H-py ran-2-yl)oxy) pentanamido)propyl)-2-((hydroxyl)methyl)-4-methoxytetrahydr ofuran-3-oxyl
ctaccatggtgatggacaga

SEQ ID NO: 916 - RNA, 20 nt, synthetic construct
  source 1..20: mol_type = other RNA
  modified_base 1: mod_base = OTHER; note = 2'-O-methyl-adenosine with phosphorothioate linkage
  modified_base 2: mod_base = OTHER; note = 2'-O-methyl-adenosine with phosphorothioate linkage
  modified_base 3: mod_base = OTHER; note = 2'-O-methyl-guanosine
  modified_base 4: mod_base = OTHER; note = 2'-O-methyl-guanosine
  modified_base 5: mod_base = OTHER; note = 2'-O-methyl-adenosine
  modified_base 6: mod_base = OTHER; note = 2'-fluoro-cytidine
  modified_base 7: mod_base = OTHER; note = 2'-O-methyl-adenosine
  modified_base 8: mod_base = OTHER; note = 2'-fluoro-uridine
  modified_base 9: mod_base = OTHER; note = 2'-fluoro-guanosine
  modified_base 10: mod_base = OTHER; note = 2'-fluoro-uridine
  modified_base 11: mod_base = OTHER; note = 2'-fluoro-cytidine
  modified_base 12: mod_base = OTHER; note = 2'-O-methyl-adenosine
  modified_base 13: mod_base = OTHER; note = 2'-O-methyl-guanosine
  modified_base 14: mod_base = OTHER; note = 2'-O-methyl-uridine
  modified_base 15: mod_base = OTHER; note = 2'-O-methyl-cytidine
  modified_base 16: mod_base = OTHER; note = 2'-O-methyl-uridine
  modified_base 17: mod_base = OTHER; note = 2'-O-methyl-uridine
  modified_base 18: mod_base = OTHER; note = 2'-O-methyl-guanosine with phosphorothioate linkage
  modified_base 19: mod_base = OTHER; note = 2'-O-methyl-guanosine with phosphorothioate linkage
  modified_base 20: mod_base = OTHER; note = 2'-O-methyl-adenosine
  modified_base 20: mod_base = OTHER; note = Nucleotide conjugated to 3 iterations of (2R,3R,4R,5S)-5-(3-(5-(((2R,3R,4R,5R,6R)- 3-acetamido-4,5-dihydroxy-6-(hydroxymethyl)tetrahydro-2H-py ran-2-yl)oxy) pentanamido)propyl)-2-((hydroxyl)methyl)-4-methoxytetrahydr ofuran-3-oxyl
aaggacatgtcagtcttgga

SEQ ID NO: 917 - RNA, 20 nt, synthetic construct
  source 1..20: mol_type = other RNA
  modified_base 1: mod_base = OTHER; note = 2'-O-methyl-guanosine with phosphorothioate linkage
  modified_base 2: mod_base = OTHER; note = 2'-O-methyl-adenosine with phosphorothioate linkage
  modified_base 3: mod_base = OTHER; note = 2'-O-methyl-adenosine
  modified_base 4: mod_base = OTHER; note = 2'-O-methyl-guanosine
  modified_base 5: mod_base = OTHER; note = 2'-O-methyl-adenosine
  modified_base 6: mod_base = OTHER; note = 2'-fluoro-adenosine
  modified_base 7: mod_base = OTHER; note = 2'-O-methyl-cytidine
  modified_base 8: mod_base = OTHER; note = 2'-fluoro-uridine
  modified_base 9: mod_base = OTHER; note = 2'-fluoro-uridine
  modified_base 10: mod_base = OTHER; note = 2'-fluoro-guanosine
  modified_base 11: mod_base = OTHER; note = 2'-fluoro-cytidine
  modified_base 12: mod_base = OTHER; note = 2'-O-methyl-cytidine
  modified_base 13: mod_base = OTHER; note = 2'-O-methyl-adenosine
  modified_base 14: mod_base = OTHER; note = 2'-O-methyl-adenosine
  modified_base 15: mod_base = OTHER; note = 2'-O-methyl-guanosine
  modified_base 16: mod_base = OTHER; note = 2'-O-methyl-cytidine
  modified_base 17: mod_base = OTHER; note = 2'-O-methyl-uridine
  modified_base 18: mod_base = OTHER; note = 2'-O-methyl-uridine with phosphorothioate linkage
  modified_base 19: mod_base = OTHER; note = 2'-O-methyl-guanosine with phosphorothioate linkage
  modified_base 20: mod_base = OTHER; note = 2'-O-methyl-adenosine
  modified_base 20: mod_base = OTHER; note = Nucleotide conjugated to 3 iterations of (2R,3R,4R,5S)-5-(3-(5-(((2R,3R,4R,5R,6R)- 3-acetamido-4,5-dihydroxy-6-(hydroxymethyl)tetrahydro-2H-py ran-2-yl)oxy) pentanamido)propyl)-2-((hydroxyl)methyl)-4-methoxytetrahydr ofuran-3-oxyl
gaagaacttgccaagcttga

SEQ ID NO: 918 - RNA, 20 nt, synthetic construct
  source 1..20: mol_type = other RNA
  modified_base 1: mod_base = OTHER; note = 2'-O-methyl-cytidine with phosphorothioate linkage
  modified_base 2: mod_base = OTHER; note = 2'-O-methyl-adenosine with phosphorothioate linkage
  modified_base 3: mod_base = OTHER; note = 2'-O-methyl-uridine
  modified_base 4: mod_base = OTHER; note = 2'-O-methyl-guanosine
  modified_base 5: mod_base = OTHER; note = 2'-O-methyl-uridine
  modified_base 6: mod_base = OTHER; note = 2'-fluoro-cytidine
  modified_base 7: mod_base = OTHER; note = 2'-O-methyl-adenosine
  modified_base 8: mod_base = OTHER; note = 2'-fluoro-guanosine
  modified_base 9: mod_base = OTHER; note = 2'-fluoro-uridine
  modified_base 10: mod_base = OTHER; note = 2'-fluoro-cytidine
  modified_base 11: mod_base = OTHER; note = 2'-fluoro-uridine
  modified_base 12: mod_base = OTHER; note = 2'-O-methyl-uridine
  modified_base 13: mod_base = OTHER; note = 2'-O-methyl-guanosine
  modified_base 14: mod_base = OTHER; note = 2'-O-methyl-guanosine
  modified_base 15: mod_base = OTHER; note = 2'-O-methyl-uridine
  modified_base 16: mod_base = OTHER; note = 2'-O-methyl-cytidine
  modified_base 17: mod_base = OTHER; note = 2'-O-methyl-cytidine
  modified_base 18: mod_base = OTHER; note = 2'-O-methyl-uridine with phosphorothioate linkage
  modified_base 19: mod_base = OTHER; note = 2'-O-methyl-cytidine with phosphorothioate linkage
  modified_base 20: mod_base = OTHER; note = 2'-O-methyl-adenosine
  modified_base 20: mod_base = OTHER; note = Nucleotide conjugated to 3 iterations of (2R,3R,4R,5S)-5-(3-(5-(((2R,3R,4R,5R,6R)- 3-acetamido-4,5-dihydroxy-6-(hydroxymethyl)tetrahydro-2H-py ran-2-yl)oxy) pentanamido)propyl)-2-((hydroxyl)methyl)-4-methoxytetrahydr ofuran-3-oxyl
catgtcagtcttggtcctca

SEQ ID NO: 919 - RNA, 20 nt, synthetic construct
  source 1..20: mol_type = other RNA
  modified_base 1: mod_base = OTHER; note = 2'-O-methyl-uridine with phosphorothioate linkage
  modified_base 2: mod_base = OTHER; note = 2'-O-methyl-uridine with phosphorothioate linkage
  modified_base 3: mod_base = OTHER; note = 2'-O-methyl-guanosine
  modified_base 4: mod_base = OTHER; note = 2'-O-methyl-cytidine
  modified_base 5: mod_base = OTHER; note = 2'-O-methyl-cytidine
  modified_base 6: mod_base = OTHER; note = 2'-fluoro-adenosine
  modified_base 7: mod_base = OTHER; note = 2'-O-methyl-adenosine
  modified_base 8: mod_base = OTHER; note = 2'-fluoro-guanosine
  modified_base 9: mod_base = OTHER; note = 2'-fluoro-cytidine
  modified_base 10: mod_base = OTHER; note = 2'-fluoro-uridine
  modified_base 11: mod_base = OTHER; note = 2'-fluoro-uridine
  modified_base 12: mod_base = OTHER; note = 2'-O-methyl-guanosine
  modified_base 13: mod_base = OTHER; note = 2'-O-methyl-guanosine
  modified_base 14: mod_base = OTHER; note = 2'-O-methyl-uridine
  modified_base 15: mod_base = OTHER; note = 2'-O-methyl-cytidine
  modified_base 16: mod_base = OTHER; note = 2'-O-methyl-adenosine
  modified_base 17: mod_base = OTHER; note = 2'-O-methyl-uridine
  modified_base 18: mod_base = OTHER; note = 2'-O-methyl-cytidine with phosphorothioate linkage
  modified_base 19: mod_base = OTHER; note = 2'-O-methyl-uridine with phosphorothioate linkage
  modified_base 20: mod_base = OTHER; note = 2'-O-methyl-adenosine
  modified_base 20: mod_base = OTHER; note = Nucleotide conjugated to 3 iterations of (2R,3R,4R,5S)-5-(3-(5-(((2R,3R,4R,5R,6R)- 3-acetamido-4,5-dihydroxy-6-(hydroxymethyl)tetrahydro-2H-py ran-2-yl)oxy) pentanamido)propyl)-2-((hydroxyl)methyl)-4-methoxytetrahydr ofuran-3-oxyl
ttgccaagcttggtcatcta

SEQ ID NO: 920 - RNA, 20 nt, synthetic construct
  source 1..20: mol_type = other RNA
  modified_base 1: mod_base = OTHER; note = 2'-O-methyl-guanosine with phosphorothioate linkage
  modified_base 2: mod_base = OTHER; note = 2'-O-methyl-guanosine with phosphorothioate linkage
  modified_base 3: mod_base = OTHER; note = 2'-O-methyl-uridine
  modified_base 4: mod_base = OTHER; note = 2'-O-methyl-guanosine
  modified_base 5: mod_base = OTHER; note = 2'-O-methyl-guanosine
  modified_base 6: mod_base = OTHER; note = 2'-fluoro-guanosine
  modified_base 7: mod_base = OTHER; note = 2'-O-methyl-adenosine
  modified_base 8: mod_base = OTHER; note = 2'-fluoro-guanosine
  modified_base 9: mod_base = OTHER; note = 2'-fluoro-uridine
  modified_base 10: mod_base = OTHER; note = 2'-fluoro-adenosine
  modified_base 11: mod_base = OTHER; note = 2'-fluoro-cytidine
  modified_base 12: mod_base = OTHER; note = 2'-O-methyl-uridine
  modified_base 13: mod_base = OTHER; note = 2'-O-methyl-guanosine
  modified_base 14: mod_base = OTHER; note = 2'-O-methyl-cytidine
  modified_base 15: mod_base = OTHER; note = 2'-O-methyl-adenosine
  modified_base 16: mod_base = OTHER; note = 2'-O-methyl-adenosine
  modified_base 17: mod_base = OTHER; note = 2'-O-methyl-cytidine
  modified_base 18: mod_base = OTHER; note = 2'-O-methyl-cytidine with phosphorothioate linkage
  modified_base 19: mod_base = OTHER; note = 2'-O-methyl-uridine with phosphorothioate linkage
  modified_base 20: mod_base = OTHER; note = 2'-O-methyl-adenosine
  modified_base 20: mod_base = OTHER; note = Nucleotide conjugated to 3 iterations of (2R,3R,4R,5S)-5-(3-(5-(((2R,3R,4R,5R,6R)- 3-acetamido-4,5-dihydroxy-6-(hydroxymethyl)tetrahydro-2H-py ran-2-yl)oxy) pentanamido)propyl)-2-((hydroxyl)methyl)-4-methoxytetrahydr ofuran-3-oxyl
ggtgggagtactgcaaccta

SEQ ID NO: 921 - RNA, 20 nt, synthetic construct
  source 1..20: mol_type = other RNA
  modified_base 1: mod_base = OTHER; note = 2'-O-methyl-uridine with phosphorothioate linkage
  modified_base 2: mod_base = OTHER; note = 2'-O-methyl-cytidine with phosphorothioate linkage
  modified_base 3: mod_base = OTHER; note = 2'-O-methyl-adenosine
  modified_base 4: mod_base = OTHER; note = 2'-O-methyl-guanosine
  modified_base 5: mod_base = OTHER; note = 2'-O-methyl-uridine
  modified_base 6: mod_base = OTHER; note = 2'-fluoro-cytidine
  modified_base 7: mod_base = OTHER; note = 2'-O-methyl-uridine
  modified_base 8: mod_base = OTHER; note = 2'-fluoro-uridine
  modified_base 9: mod_base = OTHER; note = 2'-fluoro-guanosine
  modified_base 10: mod_base = OTHER; note = 2'-fluoro-guanosine
  modified_base 11: mod_base = OTHER; note = 2'-fluoro-uridine
  modified_base 12: mod_base = OTHER; note = 2'-O-methyl-cytidine
  modified_base 13: mod_base = OTHER; note = 2'-O-methyl-cytidine
  modified_base 14: mod_base = OTHER; note = 2'-O-methyl-uridine
  modified_base 15: mod_base = OTHER; note = 2'-O-methyl-cytidine
  modified_base 16: mod_base = OTHER; note = 2'-O-methyl-uridine
  modified_base 17: mod_base = OTHER; note = 2'-O-methyl-adenosine
  modified_base 18: mod_base = OTHER; note = 2'-O-methyl-uridine with phosphorothioate linkage
  modified_base 19: mod_base = OTHER; note = 2'-O-methyl-guanosine with phosphorothioate linkage
  modified_base 20: mod_base = OTHER; note = 2'-O-methyl-adenosine
  modified_base 20: mod_base = OTHER; note = Nucleotide conjugated to 3 iterations of (2R,3R,4R,5S)-5-(3-(5-(((2R,3R,4R,5R,6R)- 3-acetamido-4,5-dihydroxy-6-(hydroxymethyl)tetrahydro-2H-py ran-2-yl)oxy) pentanamido)propyl)-2-((hydroxyl)methyl)-4-methoxytetrahydr ofuran-3-oxyl
tcagtcttggtcctctatga

SEQ ID NO: 922 - RNA, 20 nt, synthetic construct
  source 1..20: mol_type = other RNA
  modified_base 1: mod_base = OTHER; note = 2'-O-methyl-guanosine with phosphorothioate linkage
  modified_base 2: mod_base = OTHER; note = 2'-O-methyl-uridine with phosphorothioate linkage
  modified_base 3: mod_base = OTHER; note = 2'-O-methyl-uridine
  modified_base 4: mod_base = OTHER; note = 2'-O-methyl-adenosine
  modified_base 5: mod_base = OTHER; note = 2'-O-methyl-uridine
  modified_base 6: mod_base = OTHER; note = 2'-fluoro-cytidine
  modified_base 7: mod_base = OTHER; note = 2'-O-methyl-guanosine
  modified_base 8: mod_base = OTHER; note = 2'-fluoro-adenosine
  modified_base 9: mod_base = OTHER; note = 2'-fluoro-guanosine
  modified_base 10: mod_base = OTHER; note = 2'-fluoro-guanosine
  modified_base 11: mod_base = OTHER; note = 2'-fluoro-cytidine
  modified_base 12: mod_base = OTHER; note = 2'-O-methyl-adenosine
  modified_base 13: mod_base = OTHER; note = 2'-O-methyl-cytidine
  modified_base 14: mod_base = OTHER; note = 2'-O-methyl-adenosine
  modified_base 15: mod_base = OTHER; note = 2'-O-methyl-uridine
  modified_base 16: mod_base = OTHER; note = 2'-O-methyl-uridine
  modified_base 17: mod_base = OTHER; note = 2'-O-methyl-cytidine
  modified_base 18: mod_base = OTHER; note = 2'-O-methyl-uridine with phosphorothioate linkage
  modified_base 19: mod_base = OTHER; note = 2'-O-methyl-cytidine with phosphorothioate linkage
  modified_base 20: mod_base = OTHER; note = 2'-O-methyl-adenosine
  modified_base 20: mod_base = OTHER; note = Nucleotide conjugated to 3 iterations of (2R,3R,4R,5S)-5-(3-(5-(((2R,3R,4R,5R,6R)- 3-acetamido-4,5-dihydroxy-6-(hydroxymethyl)tetrahydro-2H-py ran-2-yl)oxy) pentanamido)propyl)-2-((hydroxyl)methyl)-4-methoxytetrahydr ofuran-3-oxyl
gttatcgaggcacattctca

SEQ ID NO: 923 - RNA, 20 nt, synthetic construct
  source 1..20: mol_type = other RNA
  modified_base 1: mod_base = OTHER; note = 2'-O-methyl-adenosine with phosphorothioate linkage
  modified_base 2: mod_base = OTHER; note = 2'-O-methyl-cytidine with phosphorothioate linkage
  modified_base 3: mod_base = OTHER; note = 2'-O-methyl-adenosine
  modified_base 4: mod_base = OTHER; note = 2'-O-methyl-guanosine
  modified_base 5: mod_base = OTHER; note = 2'-O-methyl-guanosine
  modified_base 6: mod_base = OTHER; note = 2'-fluoro-adenosine
  modified_base 7: mod_base = OTHER; note = 2'-O-methyl-adenosine
  modified_base 8: mod_base = OTHER; note = 2'-fluoro-guanosine
  modified_base 9: mod_base = OTHER; note = 2'-fluoro-guanosine
  modified_base 10: mod_base = OTHER; note = 2'-fluoro-adenosine
  modified_base 11: mod_base = OTHER; note = 2'-fluoro-cytidine
  modified_base 12: mod_base = OTHER; note = 2'-O-methyl-adenosine
  modified_base 13: mod_base = OTHER; note = 2'-O-methyl-uridine
  modified_base 14: mod_base = OTHER; note = 2'-O-methyl-guanosine
  modified_base 15: mod_base = OTHER; note = 2'-O-methyl-uridine
  modified_base 16: mod_base = OTHER; note = 2'-O-methyl-cytidine
  modified_base 17: mod_base = OTHER; note = 2'-O-methyl-adenosine
  modified_base 18: mod_base = OTHER; note = 2'-O-methyl-adenosine with phosphorothioate linkage
  modified_base 19: mod_base = OTHER; note = 2'-O-methyl-uridine with phosphorothioate linkage
  modified_base 20: mod_base = OTHER; note = 2'-O-methyl-adenosine
  modified_base 20: mod_base = OTHER; note = Nucleotide conjugated to 3 iterations of (2R,3R,4R,5S)-5-(3-(5-(((2R,3R,4R,5R,6R)- 3-acetamido-4,5-dihydroxy-6-(hydroxymethyl)tetrahydro-2H-py ran-2-yl)oxy) pentanamido)propyl)-2-((hydroxyl)methyl)-4-methoxytetrahydr ofuran-3-oxyl
acaggaaggacatgtcaata

SEQ ID NO: 924 - RNA, 20 nt, synthetic construct
  source 1..20: mol_type = other RNA
  modified_base 1: mod_base = OTHER; note = 2'-O-methyl-uridine with phosphorothioate linkage
  modified_base 2: mod_base = OTHER; note = 2'-O-methyl-cytidine with phosphorothioate linkage
  modified_base 3: mod_base = OTHER; note = 2'-O-methyl-adenosine
  modified_base 4: mod_base = OTHER; note = 2'-O-methyl-guanosine
  modified_base 5: mod_base = OTHER; note = 2'-O-methyl-adenosine
  modified_base 6: mod_base = OTHER; note = 2'-fluoro-guanosine
  modified_base 7: mod_base = OTHER; note = 2'-O-methyl-guanosine
  modified_base 8: mod_base = OTHER; note = 2'-fluoro-adenosine
  modified_base 9: mod_base = OTHER; note = 2'-fluoro-cytidine
  modified_base 10: mod_base = OTHER; note = 2'-fluoro-adenosine
  modified_base 11: mod_base = OTHER; note = 2'-fluoro-adenosine
  modified_base 12: mod_base = OTHER; note = 2'-O-methyl-cytidine
  modified_base 13: mod_base = OTHER; note = 2'-O-methyl-adenosine
  modified_base 14: mod_base = OTHER; note = 2'-O-methyl-guanosine
  modified_base 15: mod_base = OTHER; note = 2'-O-methyl-adenosine
  modified_base 16: mod_base = OTHER; note = 2'-O-methyl-adenosine
  modified_base 17: mod_base = OTHER; note = 2'-O-methyl-uridine
  modified_base 18: mod_base = OTHER; note = 2'-O-methyl-adenosine with phosphorothioate linkage
  modified_base 19: mod_base = OTHER; note = 2'-O-methyl-uridine with phosphorothioate linkage
  modified_base 20: mod_base = OTHER; note = 2'-O-methyl-adenosine
  modified_base 20: mod_base = OTHER; note = Nucleotide conjugated to 3 iterations of (2R,3R,4R,5S)-5-(3-(5-(((2R,3R,4R,5R,6R)- 3-acetamido-4,5-dihydroxy-6-(hydroxymethyl)tetrahydro-2H-py ran-2-yl)oxy) pentanamido)propyl)-2-((hydroxyl)methyl)-4-methoxytetrahydr ofuran-3-oxyl
tcagaggacaacagaatata

SEQ ID NO: 925 - RNA, 20 nt, synthetic construct
  source 1..20: mol_type = other RNA
  modified_base 1: mod_base = OTHER; note = 2'-O-methyl-adenosine with phosphorothioate linkage
  modified_base 2: mod_base = OTHER; note = 2'-O-methyl-uridine with phosphorothioate linkage
  modified_base 3: mod_base = OTHER; note = 2'-O-methyl-adenosine
  modified_base 4: mod_base = OTHER; note = 2'-O-methyl-cytidine
  modified_base 5: mod_base = OTHER; note = 2'-O-methyl-uridine
  modified_base 6: mod_base = OTHER; note = 2'-fluoro-adenosine
  modified_base 7: mod_base = OTHER; note = 2'-O-methyl-cytidine
  modified_base 8: mod_base = OTHER; note = 2'-fluoro-cytidine
  modified_base 9: mod_base = OTHER; note = 2'-fluoro-cytidine
  modified_base 10: mod_base = OTHER; note = 2'-fluoro-adenosine
  modified_base 11: mod_base = OTHER; note = 2'-fluoro-adenosine
  modified_base 12: mod_base = OTHER; note = 2'-O-methyl-adenosine
  modified_base 13: mod_base = OTHER; note = 2'-O-methyl-uridine
  modified_base 14: mod_base = OTHER; note = 2'-O-methyl-guanosine
  modified_base 15: mod_base = OTHER; note = 2'-O-methyl-guanosine
  modified_base 16: mod_base = OTHER; note = 2'-O-methyl-uridine
  modified_base 17: mod_base = OTHER; note = 2'-O-methyl-guanosine
  modified_base 18: mod_base = OTHER; note = 2'-O-methyl-guanosine with phosphorothioate linkage
  modified_base 19: mod_base = OTHER; note = 2'-O-methyl-cytidine with phosphorothioate linkage
  modified_base 20: mod_base = OTHER; note = 2'-O-methyl-adenosine
  modified_base 20: mod_base = OTHER; note = Nucleotide conjugated to 3 iterations of (2R,3R,4R,5S)-5-(3-(5-(((2R,3R,4R,5R,6R)- 3-acetamido-4,5-dihydroxy-6-(hydroxymethyl)tetrahydro-2H-py ran-2-yl)oxy) pentanamido)propyl)-2-((hydroxyl)methyl)-4-methoxytetrahydr ofuran-3-oxyl
atactacccaaatggtggca

SEQ ID NO: 926 - RNA, 20 nt, synthetic construct
  source 1..20: mol_type = other RNA
  modified_base 1: mod_base = OTHER; note = 2'-O-methyl-uridine with phosphorothioate linkage
  modified_base 2: mod_base = OTHER; note = 2'-O-methyl-cytidine with phosphorothioate linkage
  modified_base 3: mod_base = OTHER; note = 2'-O-methyl-guanosine
  modified_base 4: mod_base = OTHER; note = 2'-O-methyl-guanosine
  modified_base 5: mod_base = OTHER; note = 2'-O-methyl-adenosine
  modified_base 6: mod_base = OTHER; note = 2'-fluoro-cytidine
  modified_base 7: mod_base = OTHER; note = 2'-O-methyl-cytidine
  modified_base 8: mod_base = OTHER; note = 2'-fluoro-cytidine
  modified_base 9: mod_base = OTHER; note = 2'-fluoro-cytidine
  modified_base 10: mod_base = OTHER; note = 2'-fluoro-adenosine
  modified_base 11: mod_base = OTHER; note = 2'-fluoro-guanosine
  modified_base 12: mod_base = OTHER; note = 2'-O-methyl-adenosine
  modified_base 13: mod_base = OTHER; note = 2'-O-methyl-adenosine
  modified_base 14: mod_base = OTHER; note = 2'-O-methyl-adenosine
  modified_base 15: mod_base = OTHER; note = 2'-O-methyl-adenosine
  modified_base 16: mod_base = OTHER; note = 2'-O-methyl-cytidine
  modified_base 17: mod_base = OTHER; note = 2'-O-methyl-uridine
  modified_base 18: mod_base = OTHER; note = 2'-O-methyl-adenosine with phosphorothioate linkage
  modified_base 19: mod_base = OTHER; note = 2'-O-methyl-cytidine with phosphorothioate linkage
  modified_base 20: mod_base = OTHER; note = 2'-O-methyl-adenosine
  modified_base 20: mod_base = OTHER; note = Nucleotide conjugated to 3 iterations of (2R,3R,4R,5S)-5-(3-(5-(((2R,3R,4R,5R,6R)- 3-acetamido-4,5-dihydroxy-6-(hydroxymethyl)tetrahydro-2H-py ran-2-yl)oxy) pentanamido)propyl)-2-((hydroxyl)methyl)-4-methoxytetrahydr ofuran-3-oxyl
tcggaccccagaaaactaca

SEQ ID NO: 927 - RNA, 20 nt, synthetic construct
  source 1..20: mol_type = other RNA
  modified_base 1: mod_base = OTHER; note = 2'-O-methyl-cytidine with phosphorothioate linkage
  modified_base 2: mod_base = OTHER; note = 2'-O-methyl-cytidine with phosphorothioate linkage
  modified_base 3: mod_base = OTHER; note = 2'-O-methyl-uridine
  modified_base 4: mod_base = OTHER; note = 2'-O-methyl-guanosine
  modified_base 5: mod_base = OTHER; note = 2'-O-methyl-adenosine
  modified_base 6: mod_base = OTHER; note = 2'-fluoro-cytidine
  modified_base 7: mod_base = OTHER; note = 2'-O-methyl-adenosine
  modified_base 8: mod_base = OTHER; note = 2'-fluoro-cytidine
  modified_base 9: mod_base = OTHER; note = 2'-fluoro-adenosine
  modified_base 10: mod_base = OTHER; note = 2'-fluoro-adenosine
  modified_base 11: mod_base = OTHER; note = 2'-fluoro-uridine
  modified_base 12: mod_base = OTHER; note = 2'-O-methyl-guanosine
  modified_base 13: mod_base = OTHER; note = 2'-O-methyl-uridine
  modified_base 14: mod_base = OTHER; note = 2'-O-methyl-cytidine
  modified_base 15: mod_base = OTHER; note = 2'-O-methyl-cytidine
  modified_base 16: mod_base = OTHER; note = 2'-O-methyl-adenosine
  modified_base 17: mod_base = OTHER; note = 2'-O-methyl-guanosine
  modified_base 18: mod_base = OTHER; note = 2'-O-methyl-uridine with phosphorothioate linkage
  modified_base 19: mod_base = OTHER; note = 2'-O-methyl-guanosine with phosphorothioate linkage
  modified_base 20: mod_base = OTHER; note = 2'-O-methyl-adenosine
  modified_base 20: mod_base = OTHER; note = Nucleotide conjugated to 3 iterations of (2R,3R,4R,5S)-5-(3-(5-(((2R,3R,4R,5R,6R)- 3-acetamido-4,5-dihydroxy-6-(hydroxymethyl)tetrahydro-2H-py ran-2-yl)oxy) pentanamido)propyl)-2-((hydroxyl)methyl)-4-methoxytetrahydr ofuran-3-oxyl
cctgacacaatgtccagtga

SEQ ID NO: 928 - RNA, 20 nt, synthetic construct
  source 1..20: mol_type = other RNA
  modified_base 1: mod_base = OTHER; note = 2'-O-methyl-cytidine with phosphorothioate linkage
  modified_base 2: mod_base = OTHER; note = 2'-O-methyl-uridine with phosphorothioate linkage
  modified_base 3: mod_base = OTHER; note = 2'-O-methyl-cytidine
  modified_base 4: mod_base = OTHER; note = 2'-O-methyl-uridine
  modified_base 5: mod_base = OTHER; note = 2'-O-methyl-adenosine
  modified_base 6: mod_base = OTHER; note = 2'-fluoro-uridine
  modified_base 7: mod_base = OTHER; note = 2'-O-methyl-guanosine
  modified_base 8: mod_base = OTHER; note = 2'-fluoro-adenosine
  modified_base 9: mod_base = OTHER; note = 2'-fluoro-cytidine
  modified_base 10: mod_base = OTHER; note = 2'-fluoro-adenosine
  modified_base 11: mod_base = OTHER; note = 2'-fluoro-cytidine
  modified_base 12: mod_base = OTHER; note = 2'-O-methyl-cytidine
  modified_base 13: mod_base = OTHER; note = 2'-O-methyl-adenosine
  modified_base 14: mod_base = OTHER; note = 2'-O-methyl-cytidine
  modified_base 15: mod_base = OTHER; note = 2'-O-methyl-adenosine
  modified_base 16: mod_base = OTHER; note = 2'-O-methyl-cytidine
  modified_base 17: mod_base = OTHER; note = 2'-O-methyl-uridine
  modified_base 18: mod_base = OTHER; note = 2'-O-methyl-guanosine with phosphorothioate linkage
  modified_base 19: mod_base = OTHER; note = 2'-O-methyl-guanosine with phosphorothioate linkage
  modified_base 20: mod_base = OTHER; note = 2'-O-methyl-adenosine
  modified_base 20: mod_base = OTHER; note = Nucleotide conjugated to 3 iterations of (2R,3R,4R,5S)-5-(3-(5-(((2R,3R,4R,5R,6R)- 3-acetamido-4,5-dihydroxy-6-(hydroxymethyl)tetrahydro-2H-py ran-2-yl)oxy) pentanamido)propyl)-2-((hydroxyl)methyl)-4-methoxytetrahydr ofuran-3-oxyl
ctctatgacaccacactgga

SEQ ID NO: 929 - RNA, 20 nt, synthetic construct
  source 1..20: mol_type = other RNA
  modified_base 1: mod_base = OTHER; note = 2'-O-methyl-guanosine with phosphorothioate linkage
  modified_base 2: mod_base = OTHER; note = 2'-O-methyl-uridine with phosphorothioate linkage
  modified_base 3: mod_base = OTHER; note = 2'-O-methyl-guanosine
  modified_base 4: mod_base = OTHER; note = 2'-O-methyl-adenosine
  modified_base 5: mod_base = OTHER; note = 2'-O-methyl-cytidine
  modified_base 6: mod_base = OTHER; note = 2'-fluoro-adenosine
  modified_base 7: mod_base = OTHER; note = 2'-O-methyl-guanosine
  modified_base 8: mod_base = OTHER; note = 2'-fluoro-adenosine
  modified_base 9: mod_base = OTHER; note = 2'-fluoro-adenosine
  modified_base 10: mod_base = OTHER; note = 2'-fluoro-uridine
  modified_base 11: mod_base = OTHER; note = 2'-fluoro-cytidine
  modified_base 12: mod_base = OTHER; note = 2'-O-methyl-adenosine
  modified_base 13: mod_base = OTHER; note = 2'-O-methyl-adenosine
  modified_base 14: mod_base = OTHER; note = 2'-O-methyl-guanosine
  modified_base 15: mod_base = OTHER; note = 2'-O-methyl-uridine
  modified_base 16: mod_base = OTHER; note = 2'-O-methyl-guanosine
  modified_base 17: mod_base = OTHER; note = 2'-O-methyl-uridine
  modified_base 18: mod_base = OTHER; note = 2'-O-methyl-cytidine with phosphorothioate linkage
  modified_base 19: mod_base = OTHER; note = 2'-O-methyl-cytidine with phosphorothioate linkage
  modified_base 20: mod_base = OTHER; note = 2'-O-methyl-adenosine
  modified_base 20: mod_base = OTHER; note = Nucleotide conjugated to 3 iterations of (2R,3R,4R,5S)-5-(3-(5-(((2R,3R,4R,5R,6R)- 3-acetamido-4,5-dihydroxy-6-(hydroxymethyl)tetrahydro-2H-py ran-2-yl)oxy) pentanamido)propyl)-2-((hydroxyl)methyl)-4-methoxytetrahydr ofuran-3-oxyl
gtgacagaatcaagtgtcca

SEQ ID NO: 930 - RNA, 20 nt, synthetic construct
  source 1..20: mol_type = other RNA
  modified_base 1: mod_base = OTHER; note = 2'-O-methyl-adenosine with phosphorothioate linkage
  modified_base 2: mod_base = OTHER; note = 2'-O-methyl-adenosine with phosphorothioate linkage
  modified_base 3: mod_base = OTHER; note = 2'-O-methyl-uridine
  modified_base 4: mod_base = OTHER; note = 2'-O-methyl-cytidine
  modified_base 5: mod_base = OTHER; note = 2'-O-methyl-adenosine
  modified_base 6: mod_base = OTHER; note = 2'-fluoro-adenosine
  modified_base 7: mod_base = OTHER; note = 2'-O-methyl-guanosine
  modified_base 8: mod_base = OTHER; note = 2'-fluoro-uridine
  modified_base 9: mod_base = OTHER; note = 2'-fluoro-guanosine
  modified_base 10: mod_base = OTHER; note = 2'-fluoro-uridine
  modified_base 11: mod_base = OTHER; note = 2'-fluoro-cytidine
  modified_base 12: mod_base = OTHER; note = 2'-O-methyl-cytidine
  modified_base 13: mod_base = OTHER; note = 2'-O-methyl-uridine
  modified_base 14: mod_base = OTHER; note = 2'-O-methyl-uridine
  modified_base 15: mod_base = OTHER; note = 2'-O-methyl-guanosine
  modified_base 16: mod_base = OTHER; note = 2'-O-methyl-cytidine
  modified_base 17: mod_base = OTHER; note = 2'-O-methyl-adenosine
  modified_base 18: mod_base = OTHER; note = 2'-O-methyl-adenosine with phosphorothioate linkage
  modified_base 19: mod_base = OTHER; note = 2'-O-methyl-cytidine with phosphorothioate linkage
  modified_base 20: mod_base = OTHER; note = 2'-O-methyl-adenosine
  modified_base 20: mod_base = OTHER; note = Nucleotide conjugated to 3 iterations of (2R,3R,4R,5S)-5-(3-(5-(((2R,3R,4R,5R,6R)- 3-acetamido-4,5-dihydroxy-6-(hydroxymethyl)tetrahydro-2H-py ran-2-yl)oxy) pentanamido)propyl)-2-((hydroxyl)methyl)-4-methoxytetrahydr ofuran-3-oxyl
aatcaagtgtccttgcaaca

SEQ ID NO: 931 - RNA, 20 nt, synthetic construct
  source 1..20: mol_type = other RNA
  modified_base 1: mod_base = OTHER; note = 2'-O-methyl-cytidine with phosphorothioate linkage
  modified_base 2: mod_base = OTHER; note = 2'-O-methyl-cytidine with phosphorothioate linkage
  modified_base 3: mod_base = OTHER; note = 2'-O-methyl-adenosine
  modified_base 4: mod_base = OTHER; note = 2'-O-methyl-uridine
  modified_base 5: mod_base = OTHER; note = 2'-O-methyl-guanosine
  modified_base 6: mod_base = OTHER; note = 2'-fluoro-uridine
  modified_base 7: mod_base = OTHER; note = 2'-O-methyl-guanosine
  modified_base 8: mod_base = OTHER; note = 2'-fluoro-guanosine
  modified_base 9: mod_base = OTHER; note = 2'-fluoro-uridine
  modified_base 10: mod_base = OTHER; note = 2'-fluoro-cytidine
  modified_base 11: mod_base = OTHER; note = 2'-fluoro-cytidine
  modified_base 12: mod_base = OTHER; note = 2'-O-methyl-adenosine
  modified_base 13: mod_base = OTHER; note = 2'-O-methyl-guanosine
  modified_base 14: mod_base = OTHER; note = 2'-O-methyl-guanosine
  modified_base 15: mod_base = OTHER; note = 2'-O-methyl-adenosine
  modified_base 16: mod_base = OTHER; note = 2'-O-methyl-uridine
  modified_base 17: mod_base = OTHER; note = 2'-O-methyl-uridine
  modified_base 18: mod_base = OTHER; note = 2'-O-methyl-guanosine with phosphorothioate linkage
  modified_base 19: mod_base = OTHER; note = 2'-O-methyl-cytidine with phosphorothioate linkage
  modified_base 20: mod_base = OTHER; note = 2'-O-methyl-adenosine
  modified_base 20: mod_base = OTHER; note = Nucleotide conjugated to 3 iterations of (2R,3R,4R,5S)-5-(3-(5-(((2R,3R,4R,5R,6R)- 3-acetamido-4,5-dihydroxy-6-(hydroxymethyl)tetrahydro-2H-py ran-2-yl)oxy) pentanamido)propyl)-2-((hydroxyl)methyl)-4-methoxytetrahydr ofuran-3-oxyl
ccatgtggtccaggattgca

SEQ ID NO: 932 - RNA, 20 nt, synthetic construct
  source 1..20: mol_type = other RNA
  modified_base 1: mod_base = OTHER; note = 2'-O-methyl-guanosine with phosphorothioate linkage
  modified_base 2: mod_base = OTHER; note = 2'-O-methyl-adenosine with phosphorothioate linkage
  modified_base 3: mod_base = OTHER; note = 2'-O-methyl-adenosine
  modified_base 4: mod_base = OTHER; note = 2'-O-methyl-guanosine
  modified_base 5: mod_base = OTHER; note = 2'-O-methyl-adenosine
  modified_base 6: mod_base = OTHER; note = 2'-fluoro-adenosine
  modified_base 7: mod_base = OTHER; note = 2'-O-methyl-cytidine
  modified_base 8: mod_base = OTHER; note = 2'-fluoro-cytidine
  modified_base 9: mod_base = OTHER; note = 2'-fluoro-uridine
  modified_base 10: mod_base = OTHER; note = 2'-fluoro-guanosine
  modified_base 11: mod_base = OTHER; note = 2'-fluoro-cytidine
  modified_base 12: mod_base = OTHER; note = 2'-O-methyl-cytidine
  modified_base 13: mod_base = OTHER; note = 2'-O-methyl-adenosine
  modified_base 14: mod_base = OTHER; note = 2'-O-methyl-adenosine
  modified_base 15: mod_base = OTHER; note = 2'-O-methyl-guanosine
  modified_base 16: mod_base = OTHER; note = 2'-O-methyl-cytidine
  modified_base 17: mod_base = OTHER; note = 2'-O-methyl-uridine
  modified_base 18: mod_base = OTHER; note = 2'-O-methyl-uridine with phosphorothioate linkage
  modified_base 19: mod_base = OTHER; note = 2'-O-methyl-guanosine with phosphorothioate linkage
  modified_base 20: mod_base = OTHER; note = 2'-O-methyl-adenosine
  modified_base 20: mod_base = OTHER; note = Nucleotide conjugated to 3 iterations of (2R,3R,4R,5S)-5-(3-(5-(((2R,3R,4R,5R,6R)- 3-acetamido-4,5-dihydroxy-6-(hydroxymethyl)tetrahydro-2H-py ran-2-yl)oxy) pentanamido)propyl)-2-((hydroxyl)methyl)-4-methoxytetrahydr ofuran-3-oxyl
gaagaacctgccaagcttga

SEQ ID NO: 933 - RNA, 20 nt, synthetic construct
  source 1..20: mol_type = other RNA
  modified_base 1: mod_base = OTHER; note = 2'-O-methyl-uridine with phosphorothioate linkage
  modified_base 2: mod_base = OTHER; note = 2'-O-methyl-guanosine with phosphorothioate linkage
  modified_base 3: mod_base = OTHER; note = 2'-O-methyl-guanosine
  modified_base 4: mod_base = OTHER; note = 2'-O-methyl-uridine
  modified_base 5: mod_base = OTHER; note = 2'-O-methyl-guanosine
  modified_base 6: mod_base = OTHER; note = 2'-fluoro-uridine
  modified_base 7: mod_base = OTHER; note = 2'-O-methyl-uridine
  modified_base 8: mod_base = OTHER; note = 2'-fluoro-adenosine
  modified_base 9: mod_base = OTHER; note = 2'-fluoro-cytidine
  modified_base 10: mod_base = OTHER; note = 2'-fluoro-adenosine
  modified_base 11: mod_base = OTHER; note = 2'-fluoro-cytidine
  modified_base 12: mod_base = OTHER; note = 2'-O-methyl-cytidine
  modified_base 13: mod_base = OTHER; note = 2'-O-methyl-adenosine
  modified_base 14: mod_base = OTHER; note = 2'-O-methyl-uridine
  modified_base 15: mod_base = OTHER; note = 2'-O-methyl-guanosine
  modified_base 16: mod_base = OTHER; note = 2'-O-methyl-guanosine
  modified_base 17: mod_base = OTHER; note = 2'-O-methyl-adenosine
  modified_base 18: mod_base = OTHER; note = 2'-O-methyl-uridine with phosphorothioate linkage
  modified_base 19: mod_base = OTHER; note = 2'-O-methyl-cytidine with phosphorothioate linkage
  modified_base 20: mod_base = OTHER; note = 2'-O-methyl-adenosine
  modified_base 20: mod_base = OTHER; note = Nucleotide conjugated to 3 iterations of (2R,3R,4R,5S)-5-(3-(5-(((2R,3R,4R,5R,6R)- 3-acetamido-4,5-dihydroxy-6-(hydroxymethyl)tetrahydro-2H-py ran-2-yl)oxy) pentanamido)propyl)-2-((hydroxyl)methyl)-4-methoxytetrahydr ofuran-3-oxyl
tggtgttacaccatggatca

SEQ ID NO: 934 - RNA, 20 nt, synthetic construct
  source 1..20: mol_type = other RNA
  modified_base 1: mod_base = OTHER; note = 2'-O-methyl-adenosine with phosphorothioate linkage
  modified_base 2: mod_base = OTHER; note = 2'-O-methyl-guanosine with phosphorothioate linkage
  modified_base 3: mod_base = OTHER; note = 2'-O-methyl-adenosine
  modified_base 4: mod_base = OTHER; note = 2'-O-methyl-guanosine
  modified_base 5: mod_base = OTHER; note = 2'-O-methyl-guanosine
  modified_base 6: mod_base = OTHER; note = 2'-fluoro-adenosine
  modified_base 7: mod_base = OTHER; note = 2'-O-methyl-cytidine
  modified_base 8: mod_base = OTHER; note = 2'-fluoro-adenosine
  modified_base 9: mod_base = OTHER; note = 2'-fluoro-adenosine
  modified_base 10: mod_base = OTHER; note = 2'-fluoro-cytidine
  modified_base 11: mod_base = OTHER; note = 2'-fluoro-adenosine
  modified_base 12: mod_base = OTHER; note = 2'-O-methyl-guanosine
  modified_base 13: mod_base = OTHER; note = 2'-O-methyl-adenosine
  modified_base 14: mod_base = OTHER; note = 2'-O-methyl-adenosine
  modified_base 15: mod_base = OTHER; note = 2'-O-methyl-uridine
  modified_base 16: mod_base = OTHER; note = 2'-O-methyl-adenosine
  modified_base 17: mod_base = OTHER; note = 2'-O-methyl-uridine
  modified_base 18: mod_base = OTHER; note = 2'-O-methyl-uridine with phosphorothioate linkage
  modified_base 19: mod_base = OTHER; note = 2'-O-methyl-adenosine with phosphorothioate linkage
  modified_base 20: mod_base = OTHER; note = 2'-O-methyl-adenosine
  modified_base 20: mod_base = OTHER; note = Nucleotide conjugated to 3 iterations of (2R,3R,4R,5S)-5-(3-(5-(((2R,3R,4R,5R,6R)- 3-acetamido-4,5-dihydroxy-6-(hydroxymethyl)tetrahydro-2H-py ran-2-yl)oxy) pentanamido)propyl)-2-((hydroxyl)methyl)-4-methoxytetrahydr ofuran-3-oxyl
agaggacaacagaatattaa

SEQ ID NO: 935 - RNA, 20 nt, synthetic construct
  source 1..20: mol_type = other RNA
  modified_base 1: mod_base = OTHER; note = 2'-O-methyl-uridine with phosphorothioate linkage
  modified_base 2: mod_base = OTHER; note = 2'-O-methyl-guanosine with phosphorothioate linkage
  modified_base 3: mod_base = OTHER; note = 2'-O-methyl-guanosine
  modified_base 4: mod_base = OTHER; note = 2'-O-methyl-cytidine
  modified_base 5: mod_base = OTHER; note = 2'-O-methyl-adenosine
  modified_base 6: mod_base = OTHER; note = 2'-fluoro-guanosine
  modified_base 7: mod_base = OTHER; note = 2'-O-methyl-cytidine
  modified_base 8: mod_base = OTHER; note = 2'-fluoro-cytidine
  modified_base 9: mod_base = OTHER; note = 2'-fluoro-cytidine
  modified_base 10: mod_base = OTHER; note = 2'-fluoro-cytidine
  modified_base 11: mod_base = OTHER; note = 2'-fluoro-uridine
  modified_base 12: mod_base = OTHER; note = 2'-O-methyl-uridine
  modified_base 13: mod_base = OTHER; note = 2'-O-methyl-guanosine
  modified_base 14: mod_base = OTHER; note = 2'-O-methyl-guanosine
  modified_base 15: mod_base = OTHER; note = 2'-O-methyl-uridine
  modified_base 16: mod_base = OTHER; note = 2'-O-methyl-guanosine
  modified_base 17: mod_base = OTHER; note = 2'-O-methyl-uridine
  modified_base 18: mod_base = OTHER; note = 2'-O-methyl-uridine with phosphorothioate linkage
  modified_base 19: mod_base = OTHER; note = 2'-O-methyl-adenosine with phosphorothioate linkage
  modified_base 20: mod_base = OTHER; note = 2'-O-methyl-adenosine
  modified_base 20: mod_base = OTHER; note = Nucleotide conjugated to 3 iterations of (2R,3R,4R,5S)-5-(3-(5-(((2R,3R,4R,5R,6R)- 3-acetamido-4,5-dihydroxy-6-(hydroxymethyl)tetrahydro-2H-py ran-2-yl)oxy) pentanamido)propyl)-2-((hydroxyl)methyl)-4-methoxytetrahydr ofuran-3-oxyl
tggcagccccttggtgttaa

SEQ ID NO: 936 - RNA, 20 nt, synthetic construct
  source 1..20: mol_type = other RNA
  modified_base 1: mod_base = OTHER; note = 2'-O-methyl-adenosine with phosphorothioate linkage
  modified_base 2: mod_base = OTHER; note = 2'-O-methyl-uridine with phosphorothioate linkage
  modified_base 3: mod_base = OTHER; note = 2'-O-methyl-uridine
  modified_base 4: mod_base = OTHER; note = 2'-O-methyl-guanosine
  modified_base 5: mod_base = OTHER; note = 2'-O-methyl-cytidine
  modified_base 6: mod_base = OTHER; note = 2'-fluoro-uridine
  modified_base 7: mod_base = OTHER; note = 2'-O-methyl-adenosine
  modified_base 8: mod_base = OTHER; note = 2'-fluoro-cytidine
  modified_base 9: mod_base = OTHER; note = 2'-fluoro-cytidine
  modified_base 10: mod_base = OTHER; note = 2'-fluoro-adenosine
  modified_base 11: mod_base = OTHER; note = 2'-fluoro-uridine
  modified_base 12: mod_base = OTHER; note = 2'-O-methyl-guanosine
  modified_base 13: mod_base = OTHER; note = 2'-O-methyl-guanosine
  modified_base 14: mod_base = OTHER; note = 2'-O-methyl-uridine
  modified_base 15: mod_base = OTHER; note = 2'-O-methyl-guanosine
  modified_base 16: mod_base = OTHER; note = 2'-O-methyl-adenosine
  modified_base 17: mod_base = OTHER; note = 2'-O-methyl-uridine
  modified_base 18: mod_base = OTHER; note = 2'-O-methyl-guanosine with phosphorothioate linkage
  modified_base 19: mod_base = OTHER; note = 2'-O-methyl-guanosine with phosphorothioate linkage
  modified_base 20: mod_base = OTHER; note = 2'-O-methyl-adenosine
  modified_base 20: mod_base = OTHER; note = Nucleotide conjugated to 3 iterations of (2R,3R,4R,5S)-5-(3-(5-(((2R,3R,4R,5R,6R)- 3-acetamido-4,5-dihydroxy-6-(hydroxymethyl)tetrahydro-2H-py ran-2-yl)oxy) pentanamido)propyl)-2-((hydroxyl)methyl)-4-methoxytetrahydr ofuran-3-oxyl
attgctaccatggtgatgga

SEQ ID NO: 937 - RNA, 20 nt, synthetic construct
  source 1..20: mol_type = other RNA
  modified_base 1: mod_base = OTHER; note = 2'-O-methyl-cytidine with phosphorothioate linkage
  modified_base 2: mod_base = OTHER; note = 2'-O-methyl-adenosine with phosphorothioate linkage
  modified_base 3: mod_base = OTHER; note = 2'-O-methyl-guanosine
  modified_base 4: mod_base = OTHER; note = 2'-O-methyl-guanosine
  modified_base 5: mod_base = OTHER; note = 2'-O-methyl-adenosine
  modified_base 6: mod_base = OTHER; note = 2'-fluoro-adenosine
  modified_base 7: mod_base = OTHER; note = 2'-O-methyl-uridine
  modified_base 8: mod_base = OTHER; note = 2'-fluoro-cytidine
  modified_base 9: mod_base = OTHER; note = 2'-fluoro-cytidine
  modified_base 10: mod_base = OTHER; note = 2'-fluoro-adenosine
  modified_base 11: mod_base = OTHER; note = 2'-fluoro-guanosine
  modified_base 12: mod_base = OTHER; note = 2'-O-methyl-adenosine
  modified_base 13: mod_base = OTHER; note = 2'-O-methyl-uridine
  modified_base 14: mod_base = OTHER; note = 2'-O-methyl-guanosine
  modified_base 15: mod_base = OTHER; note = 2'-O-methyl-cytidine
  modified_base 16: mod_base = OTHER; note = 2'-O-methyl-uridine
  modified_base 17: mod_base = OTHER; note = 2'-O-methyl-guanosine
  modified_base 18: mod_base = OTHER; note = 2'-O-methyl-adenosine with phosphorothioate linkage
  modified_base 19: mod_base = OTHER; note = 2'-O-methyl-guanosine with phosphorothioate linkage
  modified_base 20: mod_base = OTHER; note = 2'-O-methyl-adenosine
  modified_base 20: mod_base = OTHER; note = Nucleotide conjugated to 3 iterations of (2R,3R,4R,5S)-5-(3-(5-(((2R,3R,4R,5R,6R)- 3-acetamido-4,5-dihydroxy-6-(hydroxymethyl)tetrahydro-2H-py ran-2-yl)oxy) pentanamido)propyl)-2-((hydroxyl)methyl)-4-methoxytetrahydr ofuran-3-oxyl
caggaatccagatgctgaga

SEQ ID NO: 938 - RNA, 20 nt, synthetic construct
  source 1..20: mol_type = other RNA
  modified_base 1: mod_base = OTHER; note = 2'-O-methyl-cytidine with phosphorothioate linkage
  modified_base 2: mod_base = OTHER; note = 2'-O-methyl-adenosine with phosphorothioate linkage
  modified_base 3: mod_base = OTHER; note = 2'-O-methyl-guanosine
  modified_base 4: mod_base = OTHER; note = 2'-O-methyl-guanosine
  modified_base 5: mod_base = OTHER; note = 2'-O-methyl-adenosine
  modified_base 6: mod_base = OTHER; note = 2'-fluoro-adenosine
  modified_base 7: mod_base = OTHER; note = 2'-O-methyl-uridine
  modified_base 8: mod_base = OTHER; note = 2'-fluoro-cytidine
  modified_base 9: mod_base = OTHER; note = 2'-fluoro-cytidine
  modified_base 10: mod_base = OTHER; note = 2'-fluoro-adenosine
  modified_base 11: mod_base = OTHER; note = 2'-fluoro-guanosine
  modified_base 12: mod_base = OTHER; note = 2'-O-methyl-adenosine
  modified_base 13: mod_base = OTHER; note = 2'-O-methyl-uridine
  modified_base 14: mod_base = OTHER; note = 2'-O-methyl-cytidine
  modified_base 15: mod_base = OTHER; note = 2'-O-methyl-cytidine
  modified_base 16: mod_base = OTHER; note = 2'-O-methyl-uridine
  modified_base 17: mod_base = OTHER; note = 2'-O-methyl-guanosine
  modified_base 18: mod_base = OTHER; note = 2'-O-methyl-uridine with phosphorothioate linkage
  modified_base 19: mod_base = OTHER; note = 2'-O-methyl-guanosine with phosphorothioate linkage
  modified_base 20: mod_base = OTHER; note = 2'-O-methyl-adenosine
  modified_base 20: mod_base = OTHER; note = Nucleotide conjugated to 3 iterations of (2R,3R,4R,5S)-5-(3-(5-(((2R,3R,4R,5R,6R)- 3-acetamido-4,5-dihydroxy-6-(hydroxymethyl)tetrahydro-2H-py ran-2-yl)oxy) pentanamido)propyl)-2-((hydroxyl)methyl)-4-methoxytetrahydr ofuran-3-oxyl
caggaatccagatcctgtga

SEQ ID NO: 939 - RNA, 20 nt, synthetic construct
  source 1..20: mol_type = other RNA
  modified_base 1: mod_base = OTHER; note = 2'-O-methyl-guanosine with phosphorothioate linkage
  modified_base 2: mod_base = OTHER; note = 2'-O-methyl-uridine with phosphorothioate linkage
  modified_base 3: mod_base = OTHER; note = 2'-O-methyl-cytidine
  modified_base 4: mod_base = OTHER; note = 2'-O-methyl-adenosine
  modified_base 5: mod_base = OTHER; note = 2'-O-methyl-cytidine
  modified_base 6: mod_base = OTHER; note = 2'-fluoro-adenosine
  modified_base 7: mod_base = OTHER; note = 2'-O-methyl-guanosine
  modified_base 8: mod_base = OTHER; note = 2'-fluoro-guanosine
  modified_base 9: mod_base = OTHER; note = 2'-fluoro-adenosine
  modified_base 10: mod_base = OTHER; note = 2'-fluoro-adenosine
  modified_base 11: mod_base = OTHER; note = 2'-fluoro-guanosine
  modified_base 12: mod_base = OTHER; note = 2'-O-methyl-guanosine
  modified_base 13: mod_base = OTHER; note = 2'-O-methyl-adenosine
  modified_base 14: mod_base = OTHER; note = 2'-O-methyl-cytidine
  modified_base 15: mod_base = OTHER; note = 2'-O-methyl-cytidine
  modified_base 16: mod_base = OTHER; note = 2'-O-methyl-uridine
  modified_base 17: mod_base = OTHER; note = 2'-O-methyl-guanosine
  modified_base 18: mod_base = OTHER; note = 2'-O-methyl-cytidine with phosphorothioate linkage
  modified_base 19: mod_base = OTHER; note = 2'-O-methyl-cytidine with phosphorothioate linkage
  modified_base 20: mod_base = OTHER; note = 2'-O-methyl-adenosine
  modified_base 20: mod_base = OTHER; note = Nucleotide conjugated to 3 iterations of (2R,3R,4R,5S)-5-(3-(5-(((2R,3R,4R,5R,6R)- 3-acetamido-4,5-dihydroxy-6-(hydroxymethyl)tetrahydro-2H-py ran-2-yl)oxy) pentanamido)propyl)-2-((hydroxyl)methyl)-4-methoxytetrahydr ofuran-3-oxyl
gtcacaggaaggacctgcca

SEQ ID NO: 940 - RNA, 20 nt, synthetic construct
  source 1..20: mol_type = other RNA
  modified_base 1: mod_base = OTHER; note = 2'-O-methyl-cytidine with phosphorothioate linkage
  modified_base 2: mod_base = OTHER; note = 2'-O-methyl-adenosine with phosphorothioate linkage
  modified_base 3: mod_base = OTHER; note = 2'-O-methyl-guanosine
  modified_base 4: mod_base = OTHER; note = 2'-O-methyl-guanosine
  modified_base 5: mod_base = OTHER; note = 2'-O-methyl-adenosine
  modified_base 6: mod_base = OTHER; note = 2'-fluoro-adenosine
  modified_base 7: mod_base = OTHER; note = 2'-O-methyl-guanosine
  modified_base 8: mod_base = OTHER; note = 2'-fluoro-guanosine
  modified_base 9: mod_base = OTHER; note = 2'-fluoro-adenosine
  modified_base 10: mod_base = OTHER; note = 2'-fluoro-cytidine
  modified_base 11: mod_base = OTHER; note = 2'-fluoro-adenosine
  modified_base 12: mod_base = OTHER; note = 2'-O-methyl-uridine
  modified_base 13: mod_base = OTHER; note = 2'-O-methyl-guanosine
  modified_base 14: mod_base = OTHER; note = 2'-O-methyl-uridine
  modified_base 15: mod_base = OTHER; note = 2'-O-methyl-cytidine
  modified_base 16: mod_base = OTHER; note = 2'-O-methyl-adenosine
  modified_base 17: mod_base = OTHER; note = 2'-O-methyl-guanosine
  modified_base 18: mod_base = OTHER; note = 2'-O-methyl-uridine with phosphorothioate linkage
  modified_base 19: mod_base = OTHER; note = 2'-O-methyl-cytidine with phosphorothioate linkage
  modified_base 20: mod_base = OTHER; note = 2'-O-methyl-adenosine
  modified_base 20: mod_base = OTHER; note = Nucleotide conjugated to 3 iterations of (2R,3R,4R,5S)-5-(3-(5-(((2R,3R,4R,5R,6R)- 3-acetamido-4,5-dihydroxy-6-(hydroxymethyl)tetrahydro-2H-py ran-2-yl)oxy) pentanamido)propyl)-2-((hydroxyl)methyl)-4-methoxytetrahydr ofuran-3-oxyl
caggaaggacatgtcagtca

SEQ ID NO: 941 - RNA, 20 nt, synthetic construct
  source 1..20: mol_type = other RNA
  modified_base 1: mod_base = OTHER; note = 2'-O-methyl-cytidine with phosphorothioate linkage
  modified_base 2: mod_base = OTHER; note = 2'-O-methyl-adenosine with phosphorothioate linkage
  modified_base 3: mod_base = OTHER; note = 2'-O-methyl-guanosine
  modified_base 4: mod_base = OTHER; note = 2'-O-methyl-guanosine
  modified_base 5: mod_base = OTHER; note = 2'-O-methyl-adenosine
  modified_base 6: mod_base = OTHER; note = 2'-fluoro-adenosine
  modified_base 7: mod_base = OTHER; note = 2'-O-methyl-cytidine
  modified_base 8: mod_base = OTHER; note = 2'-fluoro-uridine
  modified_base 9: mod_base = OTHER; note = 2'-fluoro-adenosine
  modified_base 10: mod_base = OTHER; note = 2'-fluoro-cytidine
  modified_base 11: mod_base = OTHER; note = 2'-fluoro-uridine
  modified_base 12: mod_base = OTHER; note = 2'-O-methyl-guanosine
  modified_base 13: mod_base = OTHER; note = 2'-O-methyl-cytidine
  modified_base 14: mod_base = OTHER; note = 2'-O-methyl-adenosine
  modified_base 15: mod_base = OTHER; note = 2'-O-methyl-guanosine
  modified_base 16: mod_base = OTHER; note = 2'-O-methyl-guanosine
  modified_base 17: mod_base = OTHER; note = 2'-O-methyl-adenosine
  modified_base 18: mod_base = OTHER; note = 2'-O-methyl-adenosine with phosphorothioate linkage
  modified_base 19: mod_base = OTHER; note = 2'-O-methyl-uridine with phosphorothioate linkage
  modified_base 20: mod_base = OTHER; note = 2'-O-methyl-adenosine
  modified_base 20: mod_base = OTHER; note = Nucleotide conjugated to 3 iterations of (2R,3R,4R,5S)-5-(3-(5-(((2R,3R,4R,5R,6R)- 3-acetamido-4,5-dihydroxy-6-(hydroxymethyl)tetrahydro-2H-py ran-2-yl)oxy) pentanamido)propyl)-2-((hydroxyl)methyl)-4-methoxytetrahydr ofuran-3-oxyl
caggaactactgcaggaata

SEQ ID NO: 942 - RNA, 20 nt, synthetic construct
  source 1..20: mol_type = other RNA
  modified_base 1: mod_base = OTHER; note = 2'-O-methyl-adenosine with phosphorothioate linkage
  modified_base 2: mod_base = OTHER; note = 2'-O-methyl-cytidine with phosphorothioate linkage
  modified_base 3: mod_base = OTHER; note = 2'-O-methyl-uridine
  modified_base 4: mod_base = OTHER; note = 2'-O-methyl-guanosine
  modified_base 5: mod_base = OTHER; note = 2'-O-methyl-cytidine
  modified_base 6: mod_base = OTHER; note = 2'-fluoro-adenosine
  modified_base 7: mod_base = OTHER; note = 2'-O-methyl-adenosine
  modified_base 8: mod_base = OTHER; note = 2'-fluoro-cytidine
  modified_base 9: mod_base = OTHER; note = 2'-fluoro-cytidine
  modified_base 10: mod_base = OTHER; note = 2'-fluoro-uridine
  modified_base 11: mod_base = OTHER; note = 2'-fluoro-guanosine
  modified_base 12: mod_base = OTHER; note = 2'-O-methyl-adenosine
  modified_base 13: mod_base = OTHER; note = 2'-O-methyl-cytidine
  modified_base 14: mod_base = OTHER; note = 2'-O-methyl-adenosine
  modified_base 15: mod_base = OTHER; note = 2'-O-methyl-cytidine
  modified_base 16: mod_base = OTHER; note = 2'-O-methyl-adenosine
  modified_base 17: mod_base = OTHER; note = 2'-O-methyl-adenosine
  modified_base 18: mod_base = OTHER; note = 2'-O-methyl-uridine with phosphorothioate linkage
  modified_base 19: mod_base = OTHER; note = 2'-O-methyl-guanosine with phosphorothioate linkage
  modified_base 20: mod_base = OTHER; note = 2'-O-methyl-adenosine
  modified_base 20: mod_base = OTHER; note = Nucleotide conjugated to 3 iterations of (2R,3R,4R,5S)-5-(3-(5-(((2R,3R,4R,5R,6R)- 3-acetamido-4,5-dihydroxy-6-(hydroxymethyl)tetrahydro-2H-py ran-2-yl)oxy) pentanamido)propyl)-2-((hydroxyl)methyl)-4-methoxytetrahydr ofuran-3-oxyl
actgcaacctgacacaatga

SEQ ID NO: 943 - RNA, 20 nt, synthetic construct
  source 1..20: mol_type = other RNA
  modified_base 1: mod_base = OTHER; note = 2'-O-methyl-cytidine with phosphorothioate linkage
  modified_base 2: mod_base = OTHER; note = 2'-O-methyl-uridine with phosphorothioate linkage
  modified_base 3: mod_base = OTHER; note = 2'-O-methyl-adenosine
  modified_base 4: mod_base = OTHER; note = 2'-O-methyl-cytidine
  modified_base 5: mod_base = OTHER; note = 2'-O-methyl-cytidine
  modified_base 6: mod_base = OTHER; note = 2'-fluoro-cytidine
  modified_base 7: mod_base = OTHER; note = 2'-O-methyl-adenosine
  modified_base 8: mod_base = OTHER; note = 2'-fluoro-adenosine
  modified_base 9: mod_base = OTHER; note = 2'-fluoro-adenosine
  modified_base 10: mod_base = OTHER; note = 2'-fluoro-uridine
  modified_base 11: mod_base = OTHER; note = 2'-fluoro-guanosine
  modified_base 12: mod_base = OTHER; note = 2'-O-methyl-cytidine
  modified_base 13: mod_base = OTHER; note = 2'-O-methyl-uridine
  modified_base 14: mod_base = OTHER; note = 2'-O-methyl-guanosine
  modified_base 15: mod_base = OTHER; note = 2'-O-methyl-guanosine
  modified_base 16: mod_base = OTHER; note = 2'-O-methyl-cytidine
  modified_base 17: mod_base = OTHER; note = 2'-O-methyl-uridine
  modified_base 18: mod_base = OTHER; note = 2'-O-methyl-uridine with phosphorothioate linkage
  modified_base 19: mod_base = OTHER; note = 2'-O-methyl-guanosine with phosphorothioate linkage
  modified_base 20: mod_base = OTHER; note = 2'-O-methyl-adenosine
  modified_base 20: mod_base = OTHER; note = Nucleotide conjugated to 3 iterations of (2R,3R,4R,5S)-5-(3-(5-(((2R,3R,4R,5R,6R)- 3-acetamido-4,5-dihydroxy-6-(hydroxymethyl)tetrahydro-2H-py ran-2-yl)oxy) pentanamido)propyl)-2-((hydroxyl)methyl)-4-methoxytetrahydr ofuran-3-oxyl
ctacccaaatgctggcttga

SEQ ID NO: 944 - RNA, 20 nt, synthetic construct
  source 1..20: mol_type = other RNA
  modified_base 1: mod_base = OTHER; note = 2'-O-methyl-cytidine with phosphorothioate linkage
  modified_base 2: mod_base = OTHER; note = 2'-O-methyl-adenosine with phosphorothioate linkage
  modified_base 3: mod_base = OTHER; note = 2'-O-methyl-cytidine
  modified_base 4: mod_base = OTHER; note = 2'-O-methyl-cytidine
  modified_base 5: mod_base = OTHER; note = 2'-O-methyl-adenosine
  modified_base 6: mod_base = OTHER; note = 2'-fluoro-uridine
  modified_base 7: mod_base = OTHER; note = 2'-O-methyl-guanosine
  modified_base 8: mod_base = OTHER; note = 2'-fluoro-guanosine
  modified_base 9: mod_base = OTHER; note = 2'-fluoro-adenosine
  modified_base 10: mod_base = OTHER; note = 2'-fluoro-uridine
  modified_base 11: mod_base = OTHER; note = 2'-fluoro-cytidine
  modified_base 12: mod_base = OTHER; note = 2'-O-methyl-cytidine
  modified_base 13: mod_base = OTHER; note = 2'-O-methyl-cytidine
  modified_base 14: mod_base = OTHER; note = 2'-O-methyl-adenosine
  modified_base 15: mod_base = OTHER; note = 2'-O-methyl-guanosine
  modified_base 16: mod_base = OTHER; note = 2'-O-methyl-uridine
  modified_base 17: mod_base = OTHER; note = 2'-O-methyl-guanosine
  modified_base 18: mod_base = OTHER; note = 2'-O-methyl-uridine with phosphorothioate linkage
  modified_base 19: mod_base = OTHER; note = 2'-O-methyl-cytidine with phosphorothioate linkage
  modified_base 20: mod_base = OTHER; note = 2'-O-methyl-adenosine
  modified_base 20: mod_base = OTHER; note = Nucleotide conjugated to 3 iterations of (2R,3R,4R,5S)-5-(3-(5-(((2R,3R,4R,5R,6R)- 3-acetamido-4,5-dihydroxy-6-(hydroxymethyl)tetrahydro-2H-py ran-2-yl)oxy) pentanamido)propyl)-2-((hydroxyl)methyl)-4-methoxytetrahydr ofuran-3-oxyl
caccatggatcccagtgtca

SEQ ID NO: 945 - RNA, 20 nt, synthetic construct
  source 1..20: mol_type = other RNA
  modified_base 1: mod_base = OTHER; note = 2'-O-methyl-guanosine with phosphorothioate linkage
  modified_base 2: mod_base = OTHER; note = 2'-O-methyl-adenosine with phosphorothioate linkage
  modified_base 3: mod_base = OTHER; note = 2'-O-methyl-adenosine
  modified_base 4: mod_base = OTHER; note = 2'-O-methyl-cytidine
  modified_base 5: mod_base = OTHER; note = 2'-O-methyl-uridine
  modified_base 6: mod_base = OTHER; note = 2'-fluoro-uridine
  modified_base 7: mod_base = OTHER; note = 2'-O-methyl-guanosine
  modified_base 8: mod_base = OTHER; note = 2'-fluoro-cytidine
  modified_base 9: mod_base = OTHER; note = 2'-fluoro-cytidine
  modified_base 10: mod_base = OTHER; note = 2'-fluoro-adenosine
  modified_base 11: mod_base = OTHER; note = 2'-fluoro-adenosine
  modified_base 12: mod_base = OTHER; note = 2'-O-methyl-guanosine
  modified_base 13: mod_base = OTHER; note = 2'-O-methyl-cytidine
  modified_base 14: mod_base = OTHER; note = 2'-O-methyl-uridine
  modified_base 15: mod_base = OTHER; note = 2'-O-methyl-uridine
  modified_base 16: mod_base = OTHER; note = 2'-O-methyl-guanosine
  modified_base 17: mod_base = OTHER; note = 2'-O-methyl-guanosine
  modified_base 18: mod_base = OTHER; note = 2'-O-methyl-uridine with phosphorothioate linkage
  modified_base 19: mod_base = OTHER; note = 2'-O-methyl-cytidine with phosphorothioate linkage
  modified_base 20: mod_base = OTHER; note = 2'-O-methyl-adenosine
  modified_base 20: mod_base = OTHER; note = Nucleotide conjugated to 3 iterations of (2R,3R,4R,5S)-5-(3-(5-(((2R,3R,4R,5R,6R)- 3-acetamido-4,5-dihydroxy-6-(hydroxymethyl)tetrahydro-2H-py ran-2-yl)oxy) pentanamido)propyl)-2-((hydroxyl)methyl)-4-methoxytetrahydr ofuran-3-oxyl
gaacttgccaagcttggtca

SEQ ID NO: 946 - RNA, 20 nt, synthetic construct
  source 1..20: mol_type = other RNA
  modified_base 1: mod_base = OTHER; note = 2'-O-methyl-adenosine with phosphorothioate linkage
  modified_base 2: mod_base = OTHER; note = 2'-O-methyl-cytidine with phosphorothioate linkage
  modified_base 3: mod_base = OTHER; note = 2'-O-methyl-cytidine
  modified_base 4: mod_base = OTHER; note = 2'-O-methyl-uridine
  modified_base 5: mod_base = OTHER; note = 2'-O-methyl-guanosine
  modified_base 6: mod_base = OTHER; note = 2'-fluoro-adenosine
  modified_base 7: mod_base = OTHER; note = 2'-O-methyl-cytidine
  modified_base 8: mod_base = OTHER; note = 2'-fluoro-adenosine
  modified_base 9: mod_base = OTHER; note = 2'-fluoro-cytidine
  modified_base 10: mod_base = OTHER; note = 2'-fluoro-adenosine
  modified_base 11: mod_base = OTHER; note = 2'-fluoro-adenosine
  modified_base 12: mod_base = OTHER; note = 2'-O-methyl-uridine
  modified_base 13: mod_base = OTHER; note = 2'-O-methyl-guanosine
  modified_base 14: mod_base = OTHER; note = 2'-O-methyl-cytidine
  modified_base 15: mod_base = OTHER; note = 2'-O-methyl-uridine
  modified_base 16: mod_base = OTHER; note = 2'-O-methyl-cytidine
  modified_base 17: mod_base = OTHER; note = 2'-O-methyl-adenosine
  modified_base 18: mod_base = OTHER; note = 2'-O-methyl-guanosine with phosphorothioate linkage
  modified_base 19: mod_base = OTHER; note = 2'-O-methyl-adenosine with phosphorothioate linkage
  modified_base 20: mod_base = OTHER; note = 2'-O-methyl-adenosine
  modified_base 20: mod_base = OTHER; note = Nucleotide conjugated to 3 iterations of (2R,3R,4R,5S)-5-(3-(5-(((2R,3R,4R,5R,6R)- 3-acetamido-4,5-dihydroxy-6-(hydroxymethyl)tetrahydro-2H-py ran-2-yl)oxy) pentanamido)propyl)-2-((hydroxyl)methyl)-4-methoxytetrahydr ofuran-3-oxyl
acctgacacaatgctcagaa

SEQ ID NO: 947 - RNA, 20 nt, synthetic construct
  source 1..20: mol_type = other RNA
  modified_base 1: mod_base = OTHER; note = 2'-O-methyl-cytidine with phosphorothioate linkage
  modified_base 2: mod_base = OTHER; note = 2'-O-methyl-uridine with phosphorothioate linkage
  modified_base 3: mod_base = OTHER; note = 2'-O-methyl-guanosine
  modified_base 4: mod_base = OTHER; note = 2'-O-methyl-cytidine
  modified_base 5: mod_base = OTHER; note = 2'-O-methyl-adenosine
  modified_base 6: mod_base = OTHER; note = 2'-fluoro-adenosine
  modified_base 7: mod_base = OTHER; note = 2'-O-methyl-cytidine
  modified_base 8: mod_base = OTHER; note = 2'-fluoro-cytidine
  modified_base 9: mod_base = OTHER; note = 2'-fluoro-uridine
  modified_base 10: mod_base = OTHER; note = 2'-fluoro-guanosine
  modified_base 11: mod_base = OTHER; note = 2'-fluoro-adenosine
  modified_base 12: mod_base = OTHER; note = 2'-O-methyl-cytidine
  modified_base 13: mod_base = OTHER; note = 2'-O-methyl-adenosine
  modified_base 14: mod_base = OTHER; note = 2'-O-methyl-cytidine
  modified_base 15: mod_base = OTHER; note = 2'-O-methyl-adenosine
  modified_base 16: mod_base = OTHER; note = 2'-O-methyl-adenosine
  modified_base 17: mod_base = OTHER; note = 2'-O-methyl-uridine
  modified_base 18: mod_base = OTHER; note = 2'-O-methyl-guanosine with phosphorothioate linkage
  modified_base 19: mod_base = OTHER; note = 2'-O-methyl-cytidine with phosphorothioate linkage
  modified_base 20: mod_base = OTHER; note = 2'-O-methyl-adenosine
  modified_base 20: mod_base = OTHER; note = Nucleotide conjugated to 3 iterations of (2R,3R,4R,5S)-5-(3-(5-(((2R,3R,4R,5R,6R)- 3-acetamido-4,5-dihydroxy-6-(hydroxymethyl)tetrahydro-2H-py ran-2-yl)oxy) pentanamido)propyl)-2-((hydroxyl)methyl)-4-methoxytetrahydr ofuran-3-oxyl
ctgcaacctgacacaatgca

SEQ ID NO: 948 - RNA, 20 nt, synthetic construct
  source 1..20: mol_type = other RNA
  modified_base 1: mod_base = OTHER; note = 2'-O-methyl-adenosine with phosphorothioate linkage
  modified_base 2: mod_base = OTHER; note = 2'-O-methyl-cytidine with phosphorothioate linkage
  modified_base 3: mod_base = OTHER; note = 2'-O-methyl-adenosine
  modified_base 4: mod_base = OTHER; note = 2'-O-methyl-adenosine
  modified_base 5: mod_base = OTHER; note = 2'-O-methyl-guanosine
  modified_base 6: mod_base = OTHER; note = 2'-fluoro-cytidine
  modified_base 7: mod_base = OTHER; note = 2'-O-methyl-adenosine
  modified_base 8: mod_base = OTHER; note = 2'-fluoro-cytidine
  modified_base 9: mod_base = OTHER; note = 2'-fluoro-cytidine
  modified_base 10: mod_base = OTHER; note = 2'-fluoro-adenosine
  modified_base 11: mod_base = OTHER; note = 2'-fluoro-adenosine
  modified_base 12: mod_base = OTHER; note = 2'-O-methyl-cytidine
  modified_base 13: mod_base = OTHER; note = 2'-O-methyl-uridine
  modified_base 14: mod_base = OTHER; note = 2'-O-methyl-guanosine
  modified_base 15: mod_base = OTHER; note = 2'-O-methyl-adenosine
  modified_base 16: mod_base = OTHER; note = 2'-O-methyl-guanosine
  modified_base 17: mod_base = OTHER; note = 2'-O-methyl-cytidine
  modified_base 18: mod_base = OTHER; note = 2'-O-methyl-adenosine with phosphorothioate linkage
  modified_base 19: mod_base = OTHER; note = 2'-O-methyl-adenosine with phosphorothioate linkage
  modified_base 20: mod_base = OTHER; note = 2'-O-methyl-adenosine
  modified_base 20: mod_base = OTHER; note = Nucleotide conjugated to 3 iterations of (2R,3R,4R,5S)-5-(3-(5-(((2R,3R,4R,5R,6R)- 3-acetamido-4,5-dihydroxy-6-(hydroxymethyl)tetrahydro-2H-py ran-2-yl)oxy) pentanamido)propyl)-2-((hydroxyl)methyl)-4-methoxytetrahydr ofuran-3-oxyl
acaagcaccaactgagcaaa

SEQ ID NO: 949 - RNA, 20 nt, synthetic construct
  source 1..20: mol_type = other RNA
  modified_base 1: mod_base = OTHER; note = 2'-O-methyl-cytidine with phosphorothioate linkage
  modified_base 2: mod_base = OTHER; note = 2'-O-methyl-cytidine with phosphorothioate linkage
  modified_base 3: mod_base = OTHER; note = 2'-O-methyl-cytidine
  modified_base 4: mod_base = OTHER; note = 2'-O-methyl-uridine
  modified_base 5: mod_base = OTHER; note = 2'-O-methyl-uridine
  modified_base 6: mod_base = OTHER; note = 2'-fluoro-guanosine
  modified_base 7: mod_base = OTHER; note = 2'-O-methyl-guanosine
  modified_base 8: mod_base = OTHER; note = 2'-fluoro-uridine
  modified_base 9: mod_base = OTHER; note = 2'-fluoro-guanosine
  modified_base 10: mod_base = OTHER; note = 2'-fluoro-uridine
  modified_base 11: mod_base = OTHER; note = 2'-fluoro-uridine
  modified_base 12: mod_base = OTHER; note = 2'-O-methyl-adenosine
  modified_base 13: mod_base = OTHER; note = 2'-O-methyl-uridine
  modified_base 14: mod_base = OTHER; note = 2'-O-methyl-adenosine
  modified_base 15: mod_base = OTHER; note = 2'-O-methyl-cytidine
  modified_base 16: mod_base = OTHER; note = 2'-O-methyl-cytidine
  modified_base 17: mod_base = OTHER; note = 2'-O-methyl-adenosine
  modified_base 18: mod_base = OTHER; note = 2'-O-methyl-uridine with phosphorothioate linkage
  modified_base 19: mod_base = OTHER; note = 2'-O-methyl-guanosine with phosphorothioate linkage
  modified_base 20: mod_base = OTHER; note = 2'-O-methyl-adenosine
  modified_base 20: mod_base = OTHER; note = Nucleotide conjugated to 3 iterations of (2R,3R,4R,5S)-5-(3-(5-(((2R,3R,4R,5R,6R)- 3-acetamido-4,5-dihydroxy-6-(hydroxymethyl)tetrahydro-2H-py ran-2-yl)oxy) pentanamido)propyl)-2-((hydroxyl)methyl)-4-methoxytetrahydr ofuran-3-oxyl
cccttggtgttataccatga

SEQ ID NO: 950 - RNA, 20 nt, synthetic construct
  source 1..20: mol_type = other RNA
  modified_base 1: mod_base = OTHER; note = 2'-O-methyl-uridine with phosphorothioate linkage
  modified_base 2: mod_base = OTHER; note = 2'-O-methyl-adenosine with phosphorothioate linkage
  modified_base 3: mod_base = OTHER; note = 2'-O-methyl-cytidine
  modified_base 4: mod_base = OTHER; note = 2'-O-methyl-cytidine
  modified_base 5: mod_base = OTHER; note = 2'-O-methyl-adenosine
  modified_base 6: mod_base = OTHER; note = 2'-fluoro-uridine
  modified_base 7: mod_base = OTHER; note = 2'-O-methyl-uridine
  modified_base 8: mod_base = OTHER; note = 2'-fluoro-adenosine
  modified_base 9: mod_base = OTHER; note = 2'-fluoro-uridine
  modified_base 10: mod_base = OTHER; note = 2'-fluoro-guanosine
  modified_base 11: mod_base = OTHER; note = 2'-fluoro-guanosine
  modified_base 12: mod_base = OTHER; note = 2'-O-methyl-adenosine
  modified_base 13: mod_base = OTHER; note = 2'-O-methyl-cytidine
  modified_base 14: mod_base = OTHER; note = 2'-O-methyl-adenosine
  modified_base 15: mod_base = OTHER; note = 2'-O-methyl-guanosine
  modified_base 16: mod_base = OTHER; note = 2'-O-methyl-adenosine
  modified_base 17: mod_base = OTHER; note = 2'-O-methyl-guanosine
  modified_base 18: mod_base = OTHER; note = 2'-O-methyl-uridine with phosphorothioate linkage
  modified_base 19: mod_base = OTHER; note = 2'-O-methyl-uridine with phosphorothioate linkage
  modified_base 20: mod_base = OTHER; note = 2'-O-methyl-adenosine
  modified_base 20: mod_base = OTHER; note = Nucleotide conjugated to 3 iterations of (2R,3R,4R,5S)-5-(3-(5-(((2R,3R,4R,5R,6R)- 3-acetamido-4,5-dihydroxy-6-(hydroxymethyl)tetrahydro-2H-py ran-2-yl)oxy) pentanamido)propyl)-2-((hydroxyl)methyl)-4-methoxytetrahydr ofuran-3-oxyl
taccattatggacagagtta

SEQ ID NO: 951 - RNA, 20 nt, synthetic construct
  source 1..20: mol_type = other RNA
  modified_base 1: mod_base = OTHER; note = 2'-O-methyl-uridine with phosphorothioate linkage
  modified_base 2: mod_base = OTHER; note = 2'-O-methyl-guanosine with phosphorothioate linkage
  modified_base 3: mod_base = OTHER; note = 2'-O-methyl-cytidine
  modified_base 4: mod_base = OTHER; note = 2'-O-methyl-cytidine
  modified_base 5: mod_base = OTHER; note = 2'-O-methyl-guanosine
  modified_base 6: mod_base = OTHER; note = 2'-fluoro-adenosine
  modified_base 7: mod_base = OTHER; note = 2'-O-methyl-adenosine
  modified_base 8: mod_base = OTHER; note = 2'-fluoro-adenosine
  modified_base 9: mod_base = OTHER; note = 2'-fluoro-uridine
  modified_base 10: mod_base = OTHER; note = 2'-fluoro-cytidine
  modified_base 11: mod_base = OTHER; note = 2'-fluoro-cytidine
  modified_base 12: mod_base = OTHER; note = 2'-O-methyl-adenosine
  modified_base 13: mod_base = OTHER; note = 2'-O-methyl-guanosine
  modified_base 14: mod_base = OTHER; note = 2'-O-methyl-adenosine
  modified_base 15: mod_base = OTHER; note = 2'-O-methyl-uridine
  modified_base 16: mod_base = OTHER; note = 2'-O-methyl-cytidine
  modified_base 17: mod_base = OTHER; note = 2'-O-methyl-cytidine
  modified_base 18: mod_base = OTHER; note = 2'-O-methyl-uridine with phosphorothioate linkage
  modified_base 19: mod_base = OTHER; note = 2'-O-methyl-guanosine with phosphorothioate linkage
  modified_base 20: mod_base = OTHER; note = 2'-O-methyl-adenosine
  modified_base 20: mod_base = OTHER; note = Nucleotide conjugated to 3 iterations of (2R,3R,4R,5S)-5-(3-(5-(((2R,3R,4R,5R,6R)- 3-acetamido-4,5-dihydroxy-6-(hydroxymethyl)tetrahydro-2H-py ran-2-yl)oxy) pentanamido)propyl)-2-((hydroxyl)methyl)-4-methoxytetrahydr ofuran-3-oxyl
tgccgaaatccagatcctga

SEQ ID NO: 952 - RNA, 20 nt, synthetic construct
  source 1..20: mol_type = other RNA
  modified_base 1: mod_base = OTHER; note = 2'-O-methyl-adenosine with phosphorothioate linkage
  modified_base 2: mod_base = OTHER; note = 2'-O-methyl-adenosine with phosphorothioate linkage
  modified_base 3: mod_base = OTHER; note = 2'-O-methyl-uridine
  modified_base 4: mod_base = OTHER; note = 2'-O-methyl-cytidine
  modified_base 5: mod_base = OTHER; note = 2'-O-methyl-cytidine
  modified_base 6: mod_base = OTHER; note = 2'-fluoro-adenosine
  modified_base 7: mod_base = OTHER; note = 2'-O-methyl-guanosine
  modified_base 8: mod_base = OTHER; note = 2'-fluoro-adenosine
  modified_base 9: mod_base = OTHER; note = 2'-fluoro-uridine
  modified_base 10: mod_base = OTHER; note = 2'-fluoro-guanosine
  modified_base 11: mod_base = OTHER; note = 2'-fluoro-cytidine
  modified_base 12: mod_base = OTHER; note = 2'-O-methyl-uridine
  modified_base 13: mod_base = OTHER; note = 2'-O-methyl-guanosine
  modified_base 14: mod_base = OTHER; note = 2'-O-methyl-adenosine
  modified_base 15: mod_base = OTHER; note = 2'-O-methyl-guanosine
  modified_base 16: mod_base = OTHER; note = 2'-O-methyl-adenosine
  modified_base 17: mod_base = OTHER; note = 2'-O-methyl-uridine
  modified_base 18: mod_base = OTHER; note = 2'-O-methyl-uridine with phosphorothioate linkage
  modified_base 19: mod_base = OTHER; note = 2'-O-methyl-cytidine with phosphorothioate linkage
  modified_base 20: mod_base = OTHER; note = 2'-O-methyl-adenosine
  modified_base 20: mod_base = OTHER; note = Nucleotide conjugated to 3 iterations of (2R,3R,4R,5S)-5-(3-(5-(((2R,3R,4R,5R,6R)- 3-acetamido-4,5-dihydroxy-6-(hydroxymethyl)tetrahydro-2H-py ran-2-yl)oxy) pentanamido)propyl)-2-((hydroxyl)methyl)-4-methoxytetrahydr ofuran-3-oxyl
aatccagatgctgagattca

SEQ ID NO: 953 - RNA, 20 nt, synthetic construct
  source 1..20: mol_type = other RNA
  modified_base 1: mod_base = OTHER; note = 2'-O-methyl-cytidine with phosphorothioate linkage
  modified_base 2: mod_base = OTHER; note = 2'-O-methyl-guanosine with phosphorothioate linkage
  modified_base 3: mod_base = OTHER; note = 2'-O-methyl-adenosine
  modified_base 4: mod_base = OTHER; note = 2'-O-methyl-guanosine
  modified_base 5: mod_base = OTHER; note = 2'-O-methyl-guanosine
  modified_base 6: mod_base = OTHER; note = 2'-fluoro-cytidine
  modified_base 7: mod_base = OTHER; note = 2'-O-methyl-adenosine
  modified_base 8: mod_base = OTHER; note = 2'-fluoro-cytidine
  modified_base 9: mod_base = OTHER; note = 2'-fluoro-adenosine
  modified_base 10: mod_base = OTHER; note = 2'-fluoro-uridine
  modified_base 11: mod_base = OTHER; note = 2'-fluoro-uridine
  modified_base 12: mod_base = OTHER; note = 2'-O-methyl-cytidine
  modified_base 13: mod_base = OTHER; note = 2'-O-methyl-uridine
  modified_base 14: mod_base = OTHER; note = 2'-O-methyl-cytidine
  modified_base 15: mod_base = OTHER; note = 2'-O-methyl-cytidine
  modified_base 16: mod_base = OTHER; note = 2'-O-methyl-adenosine
  modified_base 17: mod_base = OTHER; note = 2'-O-methyl-cytidine
  modified_base 18: mod_base = OTHER; note = 2'-O-methyl-cytidine with phosphorothioate linkage
  modified_base 19: mod_base = OTHER; note = 2'-O-methyl-adenosine with phosphorothioate linkage
  modified_base 20: mod_base = OTHER; note = 2'-O-methyl-adenosine
  modified_base 20: mod_base = OTHER; note = Nucleotide conjugated to 3 iterations of (2R,3R,4R,5S)-5-(3-(5-(((2R,3R,4R,5R,6R)- 3-acetamido-4,5-dihydroxy-6-(hydroxymethyl)tetrahydro-2H-py ran-2-yl)oxy) pentanamido)propyl)-2-((hydroxyl)methyl)-4-methoxytetrahydr ofuran-3-oxyl
cgaggcacattctccaccaa

SEQ ID NO: 954 - RNA, 20 nt, synthetic construct
  source 1..20: mol_type = other RNA
  modified_base 1: mod_base = OTHER; note = 2'-O-methyl-uridine with phosphorothioate linkage
  modified_base 2: mod_base = OTHER; note = 2'-O-methyl-adenosine with phosphorothioate linkage
  modified_base 3: mod_base = OTHER; note = 2'-O-methyl-cytidine
  modified_base 4: mod_base = OTHER; note = 2'-O-methyl-cytidine
  modified_base 5: mod_base = OTHER; note = 2'-O-methyl-cytidine
  modified_base 6: mod_base = OTHER; note = 2'-fluoro-adenosine
  modified_base 7: mod_base = OTHER; note = 2'-O-methyl-adenosine
  modified_base 8: mod_base = OTHER; note = 2'-fluoro-adenosine
  modified_base 9: mod_base = OTHER; note = 2'-fluoro-uridine
  modified_base 10: mod_base = OTHER; note = 2'-fluoro-guanosine
  modified_base 11: mod_base = OTHER; note = 2'-fluoro-cytidine
  modified_base 12: mod_base = OTHER; note = 2'-O-methyl-uridine
  modified_base 13: mod_base = OTHER; note = 2'-O-methyl-guanosine
  modified_base 14: mod_base = OTHER; note = 2'-O-methyl-guanosine
  modified_base 15: mod_base = OTHER; note = 2'-O-methyl-cytidine
  modified_base 16: mod_base = OTHER; note = 2'-O-methyl-cytidine
  modified_base 17: mod_base = OTHER; note = 2'-O-methyl-uridine
  modified_base 18: mod_base = OTHER; note = 2'-O-methyl-guanosine with phosphorothioate linkage
  modified_base 19: mod_base = OTHER; note = 2'-O-methyl-adenosine with phosphorothioate linkage
  modified_base 20: mod_base = OTHER; note = 2'-O-methyl-adenosine
  modified_base 20: mod_base = OTHER; note = Nucleotide conjugated to 3 iterations of (2R,3R,4R,5S)-5-(3-(5-(((2R,3R,4R,5R,6R)- 3-acetamido-4,5-dihydroxy-6-(hydroxymethyl)tetrahydro-2H-py ran-2-yl)oxy) pentanamido)propyl)-2-((hydroxyl)methyl)-4-methoxytetrahydr ofuran-3-oxyl
tacccaaatgctggcctgaa

SEQ ID NO: 955 - RNA, 20 nt, synthetic construct
  source 1..20: mol_type = other RNA
  modified_base 1: mod_base = OTHER; note = 2'-O-methyl-adenosine with phosphorothioate linkage
  modified_base 2: mod_base = OTHER; note = 2'-O-methyl-cytidine with phosphorothioate linkage
  modified_base 3: mod_base = OTHER; note = 2'-O-methyl-uridine
  modified_base 4: mod_base = OTHER; note = 2'-O-methyl-guanosine
  modified_base 5: mod_base = OTHER; note = 2'-O-methyl-cytidine
  modified_base 6: mod_base = OTHER; note = 2'-fluoro-adenosine
  modified_base 7: mod_base = OTHER; note = 2'-O-methyl-guanosine
  modified_base 8: mod_base = OTHER; note = 2'-fluoro-guanosine
  modified_base 9: mod_base = OTHER; note = 2'-fluoro-adenosine
  modified_base 10: mod_base = OTHER; note = 2'-fluoro-adenosine
  modified_base 11: mod_base = OTHER; note = 2'-fluoro-uridine
  modified_base 12: mod_base = OTHER; note = 2'-O-methyl-cytidine
  modified_base 13: mod_base = OTHER; note = 2'-O-methyl-cytidine
  modified_base 14: mod_base = OTHER; note = 2'-O-methyl-adenosine
  modified_base 15: mod_base = OTHER; note = 2'-O-methyl-guanosine
  modified_base 16: mod_base = OTHER; note = 2'-O-methyl-adenosine
  modified_base 17: mod_base = OTHER; note = 2'-O-methyl-uridine
  modified_base 18: mod_base = OTHER; note = 2'-O-methyl-guanosine with phosphorothioate linkage
  modified_base 19: mod_base = OTHER; note = 2'-O-methyl-cytidine with phosphorothioate linkage
  modified_base 20: mod_base = OTHER; note = 2'-O-methyl-adenosine
  modified_base 20: mod_base = OTHER; note = Nucleotide conjugated to 3 iterations of (2R,3R,4R,5S)-5-(3-(5-(((2R,3R,4R,5R,6R)- 3-acetamido-4,5-dihydroxy-6-(hydroxymethyl)tetrahydro-2H-py ran-2-yl)oxy) pentanamido)propyl)-2-((hydroxyl)methyl)-4-methoxytetrahydr ofuran-3-oxyl
actgcaggaatccagatgca

SEQ ID NO: 956 - RNA, 20 nt, synthetic construct
  source 1..20: mol_type = other RNA
  modified_base 1: mod_base = OTHER; note = 2'-O-methyl-guanosine with phosphorothioate linkage
  modified_base 2: mod_base = OTHER; note = 2'-O-methyl-guanosine with phosphorothioate linkage
  modified_base 3: mod_base = OTHER; note = 2'-O-methyl-adenosine
  modified_base 4: mod_base = OTHER; note = 2'-O-methyl-cytidine
  modified_base 5: mod_base = OTHER; note = 2'-O-methyl-adenosine
  modified_base 6: mod_base = OTHER; note = 2'-fluoro-guanosine
  modified_base 7: mod_base = OTHER; note = 2'-O-methyl-adenosine
  modified_base 8: mod_base = OTHER; note = 2'-fluoro-guanosine
  modified_base 9: mod_base = OTHER; note = 2'-fluoro-uridine
  modified_base 10: mod_base = OTHER; note = 2'-fluoro-uridine
  modified_base 11: mod_base = OTHER; note = 2'-fluoro-adenosine
  modified_base 12: mod_base = OTHER; note = 2'-O-methyl-uridine
  modified_base 13: mod_base = OTHER; note = 2'-O-methyl-cytidine
  modified_base 14: mod_base = OTHER; note = 2'-O-methyl-guanosine
  modified_base 15: mod_base = OTHER; note = 2'-O-methyl-adenosine
  modified_base 16: mod_base = OTHER; note = 2'-O-methyl-guanosine
  modified_base 17: mod_base = OTHER; note = 2'-O-methyl-guanosine
  modified_base 18: mod_base = OTHER; note = 2'-O-methyl-cytidine with phosphorothioate linkage
  modified_base 19: mod_base = OTHER; note = 2'-O-methyl-adenosine with phosphorothioate linkage
  modified_base 20: mod_base = OTHER; note = 2'-O-methyl-adenosine
  modified_base 20: mod_base = OTHER; note = Nucleotide conjugated to 3 iterations of (2R,3R,4R,5S)-5-(3-(5-(((2R,3R,4R,5R,6R)- 3-acetamido-4,5-dihydroxy-6-(hydroxymethyl)tetrahydro-2H-py ran-2-yl)oxy) pentanamido)propyl)-2-((hydroxyl)methyl)-4-methoxytetrahydr ofuran-3-oxyl
ggacagagttatcgaggcaa

SEQ ID NO: 957 - RNA, 20 nt, synthetic construct
  source 1..20: mol_type = other RNA
  modified_base 1: mod_base = OTHER; note = 2'-O-methyl-cytidine with phosphorothioate linkage
  modified_base 2: mod_base = OTHER; note = 2'-O-methyl-uridine with phosphorothioate linkage
  modified_base 3: mod_base = OTHER; note = 2'-O-methyl-cytidine
  modified_base 4: mod_base = OTHER; note = 2'-O-methyl-adenosine
  modified_base 5: mod_base = OTHER; note = 2'-O-methyl-guanosine
  modified_base 6: mod_base = OTHER; note = 2'-fluoro-adenosine
  modified_base 7: mod_base = OTHER; note = 2'-O-methyl-cytidine
  modified_base 8: mod_base = OTHER; note = 2'-fluoro-guanosine
  modified_base 9: mod_base = OTHER; note = 2'-fluoro-cytidine
  modified_base 10: mod_base = OTHER; note = 2'-fluoro-adenosine
  modified_base 11: mod_base = OTHER; note = 2'-fluoro-guanosine
  modified_base 12: mod_base = OTHER; note = 2'-O-methyl-adenosine
  modified_base 13: mod_base = OTHER; note = 2'-O-methyl-adenosine
  modified_base 14: mod_base = OTHER; note = 2'-O-methyl-guanosine
  modified_base 15: mod_base = OTHER; note = 2'-O-methyl-guanosine
  modified_base 16: mod_base = OTHER; note = 2'-O-methyl-guanosine
  modified_base 17: mod_base = OTHER; note = 2'-O-methyl-adenosine
  modified_base 18: mod_base = OTHER; note = 2'-O-methyl-cytidine with phosphorothioate linkage
  modified_base 19: mod_base = OTHER; note = 2'-O-methyl-uridine with phosphorothioate linkage
  modified_base 20: mod_base = OTHER; note = 2'-O-methyl-adenosine
  modified_base 20: mod_base = OTHER; note = Nucleotide conjugated to 3 iterations of (2R,3R,4R,5S)-5-(3-(5-(((2R,3R,4R,5R,6R)- 3-acetamido-4,5-dihydroxy-6-(hydroxymethyl)tetrahydro-2H-py ran-2-yl)oxy) pentanamido)propyl)-2-((hydroxyl)methyl)-4-methoxytetrahydr ofuran-3-oxyl
ctcagacgcagaagggacta

SEQ ID NO: 958 - RNA, 20 nt, synthetic construct
  source 1..20: mol_type = other RNA
  modified_base 1: mod_base = OTHER; note = 2'-O-methyl-adenosine with phosphorothioate linkage
  modified_base 2: mod_base = OTHER; note = 2'-O-methyl-guanosine with phosphorothioate linkage
  modified_base 3: mod_base = OTHER; note = 2'-O-methyl-adenosine
  modified_base 4: mod_base = OTHER; note = 2'-O-methyl-adenosine
  modified_base 5: mod_base = OTHER; note = 2'-O-methyl-cytidine
  modified_base 6: mod_base = OTHER; note = 2'-fluoro-uridine
  modified_base 7: mod_base = OTHER; note = 2'-O-methyl-adenosine
  modified_base 8: mod_base = OTHER; note = 2'-fluoro-cytidine
  modified_base 9: mod_base = OTHER; note = 2'-fluoro-uridine
  modified_base 10: mod_base = OTHER; note = 2'-fluoro-guanosine
  modified_base 11: mod_base = OTHER; note = 2'-fluoro-cytidine
  modified_base 12: mod_base = OTHER; note = 2'-O-methyl-cytidine
  modified_base 13: mod_base = OTHER; note = 2'-O-methyl-guanosine
  modified_base 14: mod_base = OTHER; note = 2'-O-methyl-adenosine
  modified_base 15: mod_base = OTHER; note = 2'-O-methyl-adenosine
  modified_base 16: mod_base = OTHER; note = 2'-O-methyl-adenosine
  modified_base 17: mod_base = OTHER; note = 2'-O-methyl-uridine
  modified_base 18: mod_base = OTHER; note = 2'-O-methyl-cytidine with phosphorothioate linkage
  modified_base 19: mod_base = OTHER; note = 2'-O-methyl-cytidine with phosphorothioate linkage
  modified_base 20: mod_base = OTHER; note = 2'-O-methyl-adenosine
  modified_base 20: mod_base = OTHER; note = Nucleotide conjugated to 3 iterations of (2R,3R,4R,5S)-5-(3-(5-(((2R,3R,4R,5R,6R)- 3-acetamido-4,5-dihydroxy-6-(hydroxymethyl)tetrahydro-2H-py ran-2-yl)oxy) pentanamido)propyl)-2-((hydroxyl)methyl)-4-methoxytetrahydr ofuran-3-oxyl
agaactactgccgaaatcca

SEQ ID NO: 959 - RNA, 20 nt, synthetic construct
  source 1..20: mol_type = other RNA
  modified_base 1: mod_base = OTHER; note = 2'-O-methyl-guanosine with phosphorothioate linkage
  modified_base 2: mod_base = OTHER; note = 2'-O-methyl-cytidine with phosphorothioate linkage
  modified_base 3: mod_base = OTHER; note = 2'-O-methyl-uridine
  modified_base 4: mod_base = OTHER; note = 2'-O-methyl-uridine
  modified_base 5: mod_base = OTHER; note = 2'-O-methyl-guanosine
  modified_base 6: mod_base = OTHER; note = 2'-fluoro-guanosine
  modified_base 7: mod_base = OTHER; note = 2'-O-methyl-uridine
  modified_base 8: mod_base = OTHER; note = 2'-fluoro-cytidine
  modified_base 9: mod_base = OTHER; note = 2'-fluoro-adenosine
  modified_base 10: mod_base = OTHER; note = 2'-fluoro-uridine
  modified_base 11: mod_base = OTHER; note = 2'-fluoro-cytidine
  modified_base 12: mod_base = OTHER; note = 2'-O-methyl-uridine
  modified_base 13: mod_base = OTHER; note = 2'-O-methyl-adenosine
  modified_base 14: mod_base = OTHER; note = 2'-O-methyl-uridine
  modified_base 15: mod_base = OTHER; note = 2'-O-methyl-guanosine
  modified_base 16: mod_base = OTHER; note = 2'-O-methyl-adenosine
  modified_base 17: mod_base = OTHER; note = 2'-O-methyl-cytidine
  modified_base 18: mod_base = OTHER; note = 2'-O-methyl-adenosine with phosphorothioate linkage
  modified_base 19: mod_base = OTHER; note = 2'-O-methyl-cytidine with phosphorothioate linkage
  modified_base 20: mod_base = OTHER; note = 2'-O-methyl-adenosine
  modified_base 20: mod_base = OTHER; note = Nucleotide conjugated to 3 iterations of (2R,3R,4R,5S)-5-(3-(5-(((2R,3R,4R,5R,6R)- 3-acetamido-4,5-dihydroxy-6-(hydroxymethyl)tetrahydro-2H-py ran-2-yl)oxy) pentanamido)propyl)-2-((hydroxyl)methyl)-4-methoxytetrahydr ofuran-3-oxyl
gcttggtcatctatgacaca

SEQ ID NO: 960 - RNA, 20 nt, synthetic construct
  source 1..20: mol_type = other RNA
  modified_base 1: mod_base = OTHER; note = 2'-O-methyl-cytidine with phosphorothioate linkage
  modified_base 2: mod_base = OTHER; note = 2'-O-methyl-adenosine with phosphorothioate linkage
  modified_base 3: mod_base = OTHER; note = 2'-O-methyl-cytidine
  modified_base 4: mod_base = OTHER; note = 2'-O-methyl-adenosine
  modified_base 5: mod_base = OTHER; note = 2'-O-methyl-guanosine
  modified_base 6: mod_base = OTHER; note = 2'-fluoro-guanosine
  modified_base 7: mod_base = OTHER; note = 2'-O-methyl-adenosine
  modified_base 8: mod_base = OTHER; note = 2'-fluoro-adenosine
  modified_base 9: mod_base = OTHER; note = 2'-fluoro-guanosine
  modified_base 10: mod_base = OTHER; note = 2'-fluoro-adenosine
  modified_base 11: mod_base = OTHER; note = 2'-fluoro-adenosine
  modified_base 12: mod_base = OTHER; note = 2'-O-methyl-cytidine
  modified_base 13: mod_base = OTHER; note = 2'-O-methyl-adenosine
  modified_base 14: mod_base = OTHER; note = 2'-O-methyl-uridine
  modified_base 15: mod_base = OTHER; note = 2'-O-methyl-guanosine
  modified_base 16: mod_base = OTHER; note = 2'-O-methyl-uridine
  modified_base 17: mod_base = OTHER; note = 2'-O-methyl-cytidine
  modified_base 18: mod_base = OTHER; note = 2'-O-methyl-adenosine with phosphorothioate linkage
  modified_base 19: mod_base = OTHER; note = 2'-O-methyl-guanosine with phosphorothioate linkage
  modified_base 20: mod_base = OTHER; note = 2'-O-methyl-adenosine
  modified_base 20: mod_base = OTHER; note = Nucleotide conjugated to 3 iterations of (2R,3R,4R,5S)-5-(3-(5-(((2R,3R,4R,5R,6R)- 3-acetamido-4,5-dihydroxy-6-(hydroxymethyl)tetrahydro-2H-py ran-2-yl)oxy) pentanamido)propyl)-2-((hydroxyl)methyl)-4-methoxytetrahydr ofuran-3-oxyl
cacaggaagaacatgtcaga

SEQ ID NO: 961 - RNA, 20 nt, synthetic construct
  source 1..20: mol_type = other RNA
  modified_base 1: mod_base = OTHER; note = 2'-O-methyl-cytidine with phosphorothioate linkage
  modified_base 2: mod_base = OTHER; note = 2'-O-methyl-adenosine with phosphorothioate linkage
  modified_base 3: mod_base = OTHER; note = 2'-O-methyl-adenosine
  modified_base 4: mod_base = OTHER; note = 2'-O-methyl-adenosine
  modified_base 5: mod_base = OTHER; note = 2'-O-methyl-uridine
  modified_base 6: mod_base = OTHER; note = 2'-fluoro-guanosine
  modified_base 7: mod_base = OTHER; note = 2'-O-methyl-cytidine
  modified_base 8: mod_base = OTHER; note = 2'-fluoro-uridine
  modified_base 9: mod_base = OTHER; note = 2'-fluoro-guanosine
  modified_base 10: mod_base = OTHER; note = 2'-fluoro-guanosine
  modified_base 11: mod_base = OTHER; note = 2'-fluoro-cytidine
  modified_base 12: mod_base = OTHER; note = 2'-O-methyl-cytidine
  modified_base 13: mod_base = OTHER; note = 2'-O-methyl-uridine
  modified_base 14: mod_base = OTHER; note = 2'-O-methyl-guanosine
  modified_base 15: mod_base = OTHER; note = 2'-O-methyl-adenosine
  modified_base 16: mod_base = OTHER; note = 2'-O-methyl-cytidine
  modified_base 17: mod_base = OTHER; note = 2'-O-methyl-cytidine
  modified_base 18: mod_base = OTHER; note = 2'-O-methyl-adenosine with phosphorothioate linkage
  modified_base 19: mod_base = OTHER; note = 2'-O-methyl-guanosine with phosphorothioate linkage
  modified_base 20: mod_base = OTHER; note = 2'-O-methyl-adenosine
  modified_base 20: mod_base = OTHER; note = Nucleotide conjugated to 3 iterations of (2R,3R,4R,5S)-5-(3-(5-(((2R,3R,4R,5R,6R)- 3-acetamido-4,5-dihydroxy-6-(hydroxymethyl)tetrahydro-2H-py ran-2-yl)oxy) pentanamido)propyl)-2-((hydroxyl)methyl)-4-methoxytetrahydr ofuran-3-oxyl
caaatgctggcctgaccaga

SEQ ID NO: 962 - RNA, 20 nt, synthetic construct
  source 1..20: mol_type = other RNA
  modified_base 1: mod_base = OTHER; note = 2'-O-methyl-adenosine with phosphorothioate linkage
  modified_base 2: mod_base = OTHER; note = 2'-O-methyl-guanosine with phosphorothioate linkage
  modified_base 3: mod_base = OTHER; note = 2'-O-methyl-adenosine
  modified_base 4: mod_base = OTHER; note = 2'-O-methyl-adenosine
  modified_base 5: mod_base = OTHER; note = 2'-O-methyl-guanosine
  modified_base 6: mod_base = OTHER; note = 2'-fluoro-cytidine
  modified_base 7: mod_base = OTHER; note = 2'-O-methyl-adenosine
  modified_base 8: mod_base = OTHER; note = 2'-fluoro-cytidine
  modified_base 9: mod_base = OTHER; note = 2'-fluoro-cytidine
  modified_base 10: mod_base = OTHER; note = 2'-fluoro-adenosine
  modified_base 11: mod_base = OTHER; note = 2'-fluoro-adenosine
  modified_base 12: mod_base = OTHER; note = 2'-O-methyl-cytidine
  modified_base 13: mod_base = OTHER; note = 2'-O-methyl-uridine
  modified_base 14: mod_base = OTHER; note = 2'-O-methyl-guanosine
  modified_base 15: mod_base = OTHER; note = 2'-O-methyl-adenosine
  modified_base 16: mod_base = OTHER; note = 2'-O-methyl-adenosine
  modified_base 17: mod_base = OTHER; note = 2'-O-methyl-adenosine
  modified_base 18: mod_base = OTHER; note = 2'-O-methyl-adenosine with phosphorothioate linkage
  modified_base 19: mod_base = OTHER; note = 2'-O-methyl-cytidine with phosphorothioate linkage
  modified_base 20: mod_base = OTHER; note = 2'-O-methyl-adenosine
  modified_base 20: mod_base = OTHER; note = Nucleotide conjugated to 3 iterations of (2R,3R,4R,5S)-5-(3-(5-(((2R,3R,4R,5R,6R)- 3-acetamido-4,5-dihydroxy-6-(hydroxymethyl)tetrahydro-2H-py ran-2-yl)oxy) pentanamido)propyl)-2-((hydroxyl)methyl)-4-methoxytetrahydr ofuran-3-oxyl
agaagcaccaactgaaaaca

SEQ ID NO: 963 - RNA, 20 nt, synthetic construct
  source 1..20: mol_type = other RNA
  modified_base 1: mod_base = OTHER; note = 2'-O-methyl-cytidine with phosphorothioate linkage
  modified_base 2: mod_base = OTHER; note = 2'-O-methyl-adenosine with phosphorothioate linkage
  modified_base 3: mod_base = OTHER; note = 2'-O-methyl-cytidine
  modified_base 4: mod_base = OTHER; note = 2'-O-methyl-cytidine
  modified_base 5: mod_base = OTHER; note = 2'-O-methyl-adenosine
  modified_base 6: mod_base = OTHER; note = 2'-fluoro-cytidine
  modified_base 7: mod_base = OTHER; note = 2'-O-methyl-adenosine
  modified_base 8: mod_base = OTHER; note = 2'-fluoro-cytidine
  modified_base 9: mod_base = OTHER; note = 2'-fluoro-uridine
  modified_base 10: mod_base = OTHER; note = 2'-fluoro-guanosine
  modified_base 11: mod_base = OTHER; note = 2'-fluoro-guanosine
  modified_base 12: mod_base = OTHER; note = 2'-O-methyl-cytidine
  modified_base 13: mod_base = OTHER; note = 2'-O-methyl-adenosine
  modified_base 14: mod_base = OTHER; note = 2'-O-methyl-uridine
  modified_base 15: mod_base = OTHER; note = 2'-O-methyl-cytidine
  modified_base 16: mod_base = OTHER; note = 2'-O-methyl-adenosine
  modified_base 17: mod_base = OTHER; note = 2'-O-methyl-guanosine
  modified_base 18: mod_base = OTHER; note = 2'-O-methyl-adenosine with phosphorothioate linkage
  modified_base 19: mod_base = OTHER; note = 2'-O-methyl-guanosine with phosphorothioate linkage
  modified_base 20: mod_base = OTHER; note = 2'-O-methyl-adenosine
  modified_base 20: mod_base = OTHER; note = Nucleotide conjugated to 3 iterations of (2R,3R,4R,5S)-5-(3-(5-(((2R,3R,4R,5R,6R)- 3-acetamido-4,5-dihydroxy-6-(hydroxymethyl)tetrahydro-2H-py ran-2-yl)oxy) pentanamido)propyl)-2-((hydroxyl)methyl)-4-methoxytetrahydr ofuran-3-oxyl
caccacactggcatcagaga

SEQ ID NO: 964 - RNA, 20 nt, synthetic construct
  source 1..20: mol_type = other RNA
  modified_base 1: mod_base = OTHER; note = 2'-O-methyl-guanosine with phosphorothioate linkage
  modified_base 2: mod_base = OTHER; note = 2'-O-methyl-guanosine with phosphorothioate linkage
  modified_base 3: mod_base = OTHER; note = 2'-O-methyl-adenosine
  modified_base 4: mod_base = OTHER; note = 2'-O-methyl-uridine
  modified_base 5: mod_base = OTHER; note = 2'-O-methyl-uridine
  modified_base 6: mod_base = OTHER; note = 2'-fluoro-guanosine
  modified_base 7: mod_base = OTHER; note = 2'-O-methyl-cytidine
  modified_base 8: mod_base = OTHER; note = 2'-fluoro-uridine
  modified_base 9: mod_base = OTHER; note = 2'-fluoro-adenosine
  modified_base 10: mod_base = OTHER; note = 2'-fluoro-cytidine
  modified_base 11: mod_base = OTHER; note = 2'-fluoro-cytidine
  modified_base 12: mod_base = OTHER; note = 2'-O-methyl-adenosine
  modified_base 13: mod_base = OTHER; note = 2'-O-methyl-uridine
  modified_base 14: mod_base = OTHER; note = 2'-O-methyl-guanosine
  modified_base 15: mod_base = OTHER; note = 2'-O-methyl-guanosine
  modified_base 16: mod_base = OTHER; note = 2'-O-methyl-uridine
  modified_base 17: mod_base = OTHER; note = 2'-O-methyl-guanosine
  modified_base 18: mod_base = OTHER; note = 2'-O-methyl-adenosine with phosphorothioate linkage
  modified_base 19: mod_base = OTHER; note = 2'-O-methyl-uridine with phosphorothioate linkage
  modified_base 20: mod_base = OTHER; note = 2'-O-methyl-adenosine
  modified_base 20: mod_base = OTHER; note = Nucleotide conjugated to 3 iterations of (2R,3R,4R,5S)-5-(3-(5-(((2R,3R,4R,5R,6R)- 3-acetamido-4,5-dihydroxy-6-(hydroxymethyl)tetrahydro-2H-py ran-2-yl)oxy) pentanamido)propyl)-2-((hydroxyl)methyl)-4-methoxytetrahydr ofuran-3-oxyl
ggattgctaccatggtgata

SEQ ID NO: 965 - RNA, 20 nt, synthetic construct
  source 1..20: mol_type = other RNA
  modified_base 1: mod_base = OTHER; note = 2'-O-methyl-adenosine with phosphorothioate linkage
  modified_base 2: mod_base = OTHER; note = 2'-O-methyl-uridine with phosphorothioate linkage
  modified_base 3: mod_base = OTHER; note = 2'-O-methyl-cytidine
  modified_base 4: mod_base = OTHER; note = 2'-O-methyl-guanosine
  modified_base 5: mod_base = OTHER; note = 2'-O-methyl-adenosine
  modified_base 6: mod_base = OTHER; note = 2'-fluoro-guanosine
  modified_base 7: mod_base = OTHER; note = 2'-O-methyl-guanosine
  modified_base 8: mod_base = OTHER; note = 2'-fluoro-cytidine
  modified_base 9: mod_base = OTHER; note = 2'-fluoro-uridine
  modified_base 10: mod_base = OTHER; note = 2'-fluoro-cytidine
  modified_base 11: mod_base = OTHER; note = 2'-fluoro-adenosine
  modified_base 12: mod_base = OTHER; note = 2'-O-methyl-uridine
  modified_base 13: mod_base = OTHER; note = 2'-O-methyl-uridine
  modified_base 14: mod_base = OTHER; note = 2'-O-methyl-cytidine
  modified_base 15: mod_base = OTHER; note = 2'-O-methyl-uridine
  modified_base 16: mod_base = OTHER; note = 2'-O-methyl-cytidine
  modified_base 17: mod_base = OTHER; note = 2'-O-methyl-cytidine
  modified_base 18: mod_base = OTHER; note = 2'-O-methyl-adenosine with phosphorothioate linkage
  modified_base 19: mod_base = OTHER; note = 2'-O-methyl-cytidine with phosphorothioate linkage
  modified_base 20: mod_base = OTHER; note = 2'-O-methyl-adenosine
  modified_base 20: mod_base = OTHER; note = Nucleotide conjugated to 3 iterations of (2R,3R,4R,5S)-5-(3-(5-(((2R,3R,4R,5R,6R)- 3-acetamido-4,5-dihydroxy-6-(hydroxymethyl)tetrahydro-2H-py ran-2-yl)oxy) pentanamido)propyl)-2-((hydroxyl)methyl)-4-methoxytetrahydr ofuran-3-oxyl
atcgaggctcattctccaca

SEQ ID NO: 966 - RNA, 20 nt, synthetic construct
  source 1..20: mol_type = other RNA
  modified_base 1: mod_base = OTHER; note = 2'-O-methyl-guanosine with phosphorothioate linkage
  modified_base 2: mod_base = OTHER; note = 2'-O-methyl-cytidine with phosphorothioate linkage
  modified_base 3: mod_base = OTHER; note = 2'-O-methyl-adenosine
  modified_base 4: mod_base = OTHER; note = 2'-O-methyl-uridine
  modified_base 5: mod_base = OTHER; note = 2'-O-methyl-cytidine
  modified_base 6: mod_base = OTHER; note = 2'-fluoro-adenosine
  modified_base 7: mod_base = OTHER; note = 2'-O-methyl-guanosine
  modified_base 8: mod_base = OTHER; note = 2'-fluoro-adenosine
  modified_base 9: mod_base = OTHER; note = 2'-fluoro-guanosine
  modified_base 10: mod_base = OTHER; note = 2'-fluoro-guanosine
  modified_base 11: mod_base = OTHER; note = 2'-fluoro-adenosine
  modified_base 12: mod_base = OTHER; note = 2'-O-methyl-cytidine
  modified_base 13: mod_base = OTHER; note = 2'-O-methyl-adenosine
  modified_base 14: mod_base = OTHER; note = 2'-O-methyl-adenosine
  modified_base 15: mod_base = OTHER; note = 2'-O-methyl-cytidine
  modified_base 16: mod_base = OTHER; note = 2'-O-methyl-adenosine
  modified_base 17: mod_base = OTHER; note = 2'-O-methyl-guanosine
  modified_base 18: mod_base = OTHER; note = 2'-O-methyl-adenosine with phosphorothioate linkage
  modified_base 19: mod_base = OTHER; note = 2'-O-methyl-adenosine with phosphorothioate linkage
  modified_base 20: mod_base = OTHER; note = 2'-O-methyl-adenosine
  modified_base 20: mod_base = OTHER; note = Nucleotide conjugated to 3 iterations of (2R,3R,4R,5S)-5-(3-(5-(((2R,3R,4R,5R,6R)- 3-acetamido-4,5-dihydroxy-6-(hydroxymethyl)tetrahydro-2H-py ran-2-yl)oxy) pentanamido)propyl)-2-((hydroxyl)methyl)-4-methoxytetrahydr ofuran-3-oxyl
gcatcagaggacaacagaaa

SEQ ID NO: 967 - RNA, 20 nt, synthetic construct
  source 1..20: mol_type = other RNA
  modified_base 1: mod_base = OTHER; note = 2'-O-methyl-adenosine with phosphorothioate linkage
  modified_base 2: mod_base = OTHER; note = 2'-O-methyl-cytidine with phosphorothioate linkage
  modified_base 3: mod_base = OTHER; note = 2'-O-methyl-adenosine
  modified_base 4: mod_base = OTHER; note = 2'-O-methyl-cytidine
  modified_base 5: mod_base = OTHER; note = 2'-O-methyl-adenosine
  modified_base 6: mod_base = OTHER; note = 2'-fluoro-adenosine
  modified_base 7: mod_base = OTHER; note = 2'-O-methyl-uridine
  modified_base 8: mod_base = OTHER; note = 2'-fluoro-guanosine
  modified_base 9: mod_base = OTHER; note = 2'-fluoro-uridine
  modified_base 10: mod_base = OTHER; note = 2'-fluoro-cytidine
  modified_base 11: mod_base = OTHER; note = 2'-fluoro-cytidine
  modified_base 12: mod_base = OTHER; note = 2'-O-methyl-adenosine
  modified_base 13: mod_base = OTHER; note = 2'-O-methyl-guanosine
  modified_base 14: mod_base = OTHER; note = 2'-O-methyl-uridine
  modified_base 15: mod_base = OTHER; note = 2'-O-methyl-guanosine
  modified_base 16: mod_base = OTHER; note = 2'-O-methyl-adenosine
  modified_base 17: mod_base = OTHER; note = 2'-O-methyl-cytidine
  modified_base 18: mod_base = OTHER; note = 2'-O-methyl-adenosine with phosphorothioate linkage
  modified_base 19: mod_base = OTHER; note = 2'-O-methyl-guanosine with phosphorothioate linkage
  modified_base 20: mod_base = OTHER; note = 2'-O-methyl-adenosine
  modified_base 20: mod_base = OTHER; note = Nucleotide conjugated to 3 iterations of (2R,3R,4R,5S)-5-(3-(5-(((2R,3R,4R,5R,6R)- 3-acetamido-4,5-dihydroxy-6-(hydroxymethyl)tetrahydro-2H-py ran-2-yl)oxy) pentanamido)propyl)-2-((hydroxyl)methyl)-4-methoxytetrahydr ofuran-3-oxyl
acacaatgtccagtgacaga

SEQ ID NO: 968 - RNA, 20 nt, synthetic construct
  source 1..20: mol_type = other RNA
  modified_base 1: mod_base = OTHER; note = 2'-O-methyl-guanosine with phosphorothioate linkage
  modified_base 2: mod_base = OTHER; note = 2'-O-methyl-guanosine with phosphorothioate linkage
  modified_base 3: mod_base = OTHER; note = 2'-O-methyl-cytidine
  modified_base 4: mod_base = OTHER; note = 2'-O-methyl-uridine
  modified_base 5: mod_base = OTHER; note = 2'-O-methyl-cytidine
  modified_base 6: mod_base = OTHER; note = 2'-fluoro-cytidine
  modified_base 7: mod_base = OTHER; note = 2'-O-methyl-uridine
  modified_base 8: mod_base = OTHER; note = 2'-fluoro-uridine
  modified_base 9: mod_base = OTHER; note = 2'-fluoro-cytidine
  modified_base 10: mod_base = OTHER; note = 2'-fluoro-uridine
  modified_base 11: mod_base = OTHER; note = 2'-fluoro-guanosine
  modified_base 12: mod_base = OTHER; note = 2'-O-methyl-adenosine
  modified_base 13: mod_base = OTHER; note = 2'-O-methyl-adenosine
  modified_base 14: mod_base = OTHER; note = 2'-O-methyl-cytidine
  modified_base 15: mod_base = OTHER; note = 2'-O-methyl-adenosine
  modified_base 16: mod_base = OTHER; note = 2'-O-methyl-adenosine
  modified_base 17: mod_base = OTHER; note = 2'-O-methyl-guanosine
  modified_base 18: mod_base = OTHER; note = 2'-O-methyl-cytidine with phosphorothioate linkage
  modified_base 19: mod_base = OTHER; note = 2'-O-methyl-adenosine with phosphorothioate linkage
  modified_base 20: mod_base = OTHER; note = 2'-O-methyl-adenosine
  modified_base 20: mod_base = OTHER; note = Nucleotide conjugated to 3 iterations of (2R,3R,4R,5S)-5-(3-(5-(((2R,3R,4R,5R,6R)- 3-acetamido-4,5-dihydroxy-6-(hydroxymethyl)tetrahydro-2H-py ran-2-yl)oxy) pentanamido)propyl)-2-((hydroxyl)methyl)-4-methoxytetrahydr ofuran-3-oxyl
ggctccttctgaacaagcaa

SEQ ID NO: 969 - RNA, 20 nt, synthetic construct
  source 1..20: mol_type = other RNA
  modified_base 1: mod_base = OTHER; note = 2'-O-methyl-adenosine with phosphorothioate linkage
  modified_base 2: mod_base = OTHER; note = 2'-O-methyl-adenosine with phosphorothioate linkage
  modified_base 3: mod_base = OTHER; note = 2'-O-methyl-guanosine
  modified_base 4: mod_base = OTHER; note = 2'-O-methyl-cytidine
  modified_base 5: mod_base = OTHER; note = 2'-O-methyl-adenosine
  modified_base 6: mod_base = OTHER; note = 2'-fluoro-cytidine
  modified_base 7: mod_base = OTHER; note = 2'-O-methyl-cytidine
  modified_base 8: mod_base = OTHER; note = 2'-fluoro-guanosine
  modified_base 9: mod_base = OTHER; note = 2'-fluoro-adenosine
  modified_base 10: mod_base = OTHER; note = 2'-fluoro-cytidine
  modified_base 11: mod_base = OTHER; note = 2'-fluoro-uridine
  modified_base 12: mod_base = OTHER; note = 2'-O-methyl-guanosine
  modified_base 13: mod_base = OTHER; note = 2'-O-methyl-adenosine
  modified_base 14: mod_base = OTHER; note = 2'-O-methyl-guanosine
  modified_base 15: mod_base = OTHER; note = 2'-O-methyl-cytidine
  modified_base 16: mod_base = OTHER; note = 2'-O-methyl-adenosine
  modified_base 17: mod_base = OTHER; note = 2'-O-methyl-adenosine
  modified_base 18: mod_base = OTHER; note = 2'-O-methyl-adenosine with phosphorothioate linkage
  modified_base 19: mod_base = OTHER; note = 2'-O-methyl-guanosine with phosphorothioate linkage
  modified_base 20: mod_base = OTHER; note = 2'-O-methyl-adenosine
  modified_base 20: mod_base = OTHER; note = Nucleotide conjugated to 3 iterations of (2R,3R,4R,5S)-5-(3-(5-(((2R,3R,4R,5R,6R)- 3-acetamido-4,5-dihydroxy-6-(hydroxymethyl)tetrahydro-2H-py ran-2-yl)oxy) pentanamido)propyl)-2-((hydroxyl)methyl)-4-methoxytetrahydr ofuran-3-oxyl
aagcaccgactgagcaaaga

SEQ ID NO: 970 - RNA, 20 nt, synthetic construct
  source 1..20: mol_type = other RNA
  modified_base 1: mod_base = OTHER; note = 2'-O-methyl-uridine with phosphorothioate linkage
  modified_base 2: mod_base = OTHER; note = 2'-O-methyl-guanosine with phosphorothioate linkage
  modified_base 3: mod_base = OTHER; note = 2'-O-methyl-guanosine
  modified_base 4: mod_base = OTHER; note = 2'-O-methyl-cytidine
  modified_base 5: mod_base = OTHER; note = 2'-O-methyl-adenosine
  modified_base 6: mod_base = OTHER; note = 2'-fluoro-uridine
  modified_base 7: mod_base = OTHER; note = 2'-O-methyl-cytidine
  modified_base 8: mod_base = OTHER; note = 2'-fluoro-adenosine
  modified_base 9: mod_base = OTHER; note = 2'-fluoro-guanosine
  modified_base 10: mod_base = OTHER; note = 2'-fluoro-adenosine
  modified_base 11: mod_base = OTHER; note = 2'-fluoro-guanosine
  modified_base 12: mod_base = OTHER; note = 2'-O-methyl-guanosine
  modified_base 13: mod_base = OTHER; note = 2'-O-methyl-adenosine
  modified_base 14: mod_base = OTHER; note = 2'-O-methyl-cytidine
  modified_base 15: mod_base = OTHER; note = 2'-O-methyl-adenosine
  modified_base 16: mod_base = OTHER; note = 2'-O-methyl-adenosine
  modified_base 17: mod_base = OTHER; note = 2'-O-methyl-cytidine
  modified_base 18: mod_base = OTHER; note = 2'-O-methyl-adenosine with phosphorothioate linkage
  modified_base 19: mod_base = OTHER; note = 2'-O-methyl-guanosine with phosphorothioate linkage
  modified_base 20: mod_base = OTHER; note = 2'-O-methyl-adenosine
  modified_base 20: mod_base = OTHER; note = Nucleotide conjugated to 3 iterations of (2R,3R,4R,5S)-5-(3-(5-(((2R,3R,4R,5R,6R)- 3-acetamido-4,5-dihydroxy-6-(hydroxymethyl)tetrahydro-2H-py ran-2-yl)oxy) pentanamido)propyl)-2-((hydroxyl)methyl)-4-methoxytetrahydr ofuran-3-oxyl
tggcatcagaggacaacaga

SEQ ID NO: 971 - RNA, 20 nt, synthetic construct
  source 1..20: mol_type = other RNA
  modified_base 1: mod_base = OTHER; note = 2'-O-methyl-adenosine with phosphorothioate linkage
  modified_base 2: mod_base = OTHER; note = 2'-O-methyl-adenosine with phosphorothioate linkage
  modified_base 3: mod_base = OTHER; note = 2'-O-methyl-guanosine
  modified_base 4: mod_base = OTHER; note = 2'-O-methyl-adenosine
  modified_base 5: mod_base = OTHER; note = 2'-O-methyl-adenosine
  modified_base 6: mod_base = OTHER; note = 2'-fluoro-cytidine
  modified_base 7: mod_base = OTHER; note = 2'-O-methyl-uridine
  modified_base 8: mod_base = OTHER; note = 2'-fluoro-uridine
  modified_base 9: mod_base = OTHER; note = 2'-fluoro-guanosine
  modified_base 10: mod_base = OTHER; note = 2'-fluoro-cytidine
  modified_base 11: mod_base = OTHER; note = 2'-fluoro-cytidine
  modified_base 12: mod_base = OTHER; note = 2'-O-methyl-adenosine
  modified_base 13: mod_base = OTHER; note = 2'-O-methyl-adenosine
  modified_base 14: mod_base = OTHER; note = 2'-O-methyl-guanosine
  modified_base 15: mod_base = OTHER; note = 2'-O-methyl-cytidine
  modified_base 16: mod_base = OTHER; note = 2'-O-methyl-uridine
  modified_base 17: mod_base = OTHER; note = 2'-O-methyl-uridine
  modified_base 18: mod_base = OTHER; note = 2'-O-methyl-guanosine with phosphorothioate linkage
  modified_base 19: mod_base = OTHER; note = 2'-O-methyl-guanosine with phosphorothioate linkage
  modified_base 20: mod_base = OTHER; note = 2'-O-methyl-adenosine
  modified_base 20: mod_base = OTHER; note = Nucleotide conjugated to 3 iterations of (2R,3R,4R,5S)-5-(3-(5-(((2R,3R,4R,5R,6R)- 3-acetamido-4,5-dihydroxy-6-(hydroxymethyl)tetrahydro-2H-py ran-2-yl)oxy) pentanamido)propyl)-2-((hydroxyl)methyl)-4-methoxytetrahydr ofuran-3-oxyl
aagaacttgccaagcttgga

SEQ ID NO: 972 - RNA, 20 nt, synthetic construct
  source 1..20: mol_type = other RNA
  modified_base 1: mod_base = OTHER; note = 2'-O-methyl-guanosine with phosphorothioate linkage
  modified_base 2: mod_base = OTHER; note = 2'-O-methyl-guanosine with phosphorothioate linkage
  modified_base 3: mod_base = OTHER; note = 2'-O-methyl-uridine
  modified_base 4: mod_base = OTHER; note = 2'-O-methyl-cytidine
  modified_base 5: mod_base = OTHER; note = 2'-O-methyl-cytidine
  modified_base 6: mod_base = OTHER; note = 2'-fluoro-adenosine
  modified_base 7: mod_base = OTHER; note = 2'-O-methyl-guanosine
  modified_base 8: mod_base = OTHER; note = 2'-fluoro-guanosine
  modified_base 9: mod_base = OTHER; note = 2'-fluoro-adenosine
  modified_base 10: mod_base = OTHER; note = 2'-fluoro-uridine
  modified_base 11: mod_base = OTHER; note = 2'-fluoro-uridine
  modified_base 12: mod_base = OTHER; note = 2'-O-methyl-guanosine
  modified_base 13: mod_base = OTHER; note = 2'-O-methyl-cytidine
  modified_base 14: mod_base = OTHER; note = 2'-O-methyl-uridine
  modified_base 15: mod_base = OTHER; note = 2'-O-methyl-adenosine
  modified_base 16: mod_base = OTHER; note = 2'-O-methyl-cytidine
  modified_base 17: mod_base = OTHER; note = 2'-O-methyl-cytidine
  modified_base 18: mod_base = OTHER; note = 2'-O-methyl-adenosine with phosphorothioate linkage
  modified_base 19: mod_base = OTHER; note = 2'-O-methyl-uridine with phosphorothioate linkage
  modified_base 20: mod_base = OTHER; note = 2'-O-methyl-adenosine
  modified_base 20: mod_base = OTHER; note = Nucleotide conjugated to 3 iterations of (2R,3R,4R,5S)-5-(3-(5-(((2R,3R,4R,5R,6R)- 3-acetamido-4,5-dihydroxy-6-(hydroxymethyl)tetrahydro-2H-py ran-2-yl)oxy) pentanamido)propyl)-2-((hydroxyl)methyl)-4-methoxytetrahydr ofuran-3-oxyl
ggtccaggattgctaccata

SEQ ID NO: 973 - RNA, 20 nt, synthetic construct
  source 1..20: mol_type = other RNA
  modified_base 1: mod_base = OTHER; note = 2'-O-methyl-uridine with phosphorothioate linkage
  modified_base 2: mod_base = OTHER; note = 2'-O-methyl-uridine with phosphorothioate linkage
  modified_base 3: mod_base = OTHER; note = 2'-O-methyl-cytidine
  modified_base 4: mod_base = OTHER; note = 2'-O-methyl-guanosine
  modified_base 5: mod_base = OTHER; note = 2'-O-methyl-cytidine
  modified_base 6: mod_base = OTHER; note = 2'-fluoro-cytidine
  modified_base 7: mod_base = OTHER; note = 2'-O-methyl-cytidine
  modified_base 8: mod_base = OTHER; note = 2'-fluoro-uridine
  modified_base 9: mod_base = OTHER; note = 2'-fluoro-uridine
  modified_base 10: mod_base = OTHER; note = 2'-fluoro-guanosine
  modified_base 11: mod_base = OTHER; note = 2'-fluoro-guanosine
  modified_base 12: mod_base = OTHER; note = 2'-O-methyl-uridine
  modified_base 13: mod_base = OTHER; note = 2'-O-methyl-guanosine
  modified_base 14: mod_base = OTHER; note = 2'-O-methyl-uridine
  modified_base 15: mod_base = OTHER; note = 2'-O-methyl-uridine
  modified_base 16: mod_base = OTHER; note = 2'-O-methyl-adenosine
  modified_base 17: mod_base = OTHER; note = 2'-O-methyl-uridine
  modified_base 18: mod_base = OTHER; note = 2'-O-methyl-adenosine with phosphorothioate linkage
  modified_base 19: mod_base = OTHER; note = 2'-O-methyl-cytidine with phosphorothioate linkage
  modified_base 20: mod_base = OTHER; note = 2'-O-methyl-adenosine
  modified_base 20: mod_base = OTHER; note = Nucleotide conjugated to 3 iterations of (2R,3R,4R,5S)-5-(3-(5-(((2R,3R,4R,5R,6R)- 3-acetamido-4,5-dihydroxy-6-(hydroxymethyl)tetrahydro-2H-py ran-2-yl)oxy) pentanamido)propyl)-2-((hydroxyl)methyl)-4-methoxytetrahydr ofuran-3-oxyl
ttcgcccttggtgttataca

SEQ ID NO: 974 - RNA, 20 nt, synthetic construct
  source 1..20: mol_type = other RNA
  modified_base 1: mod_base = OTHER; note = 2'-O-methyl-uridine with phosphorothioate linkage
  modified_base 2: mod_base = OTHER; note = 2'-O-methyl-adenosine with phosphorothioate linkage
  modified_base 3: mod_base = OTHER; note = 2'-O-methyl-cytidine
  modified_base 4: mod_base = OTHER; note = 2'-O-methyl-cytidine
  modified_base 5: mod_base = OTHER; note = 2'-O-methyl-adenosine
  modified_base 6: mod_base = OTHER; note = 2'-fluoro-uridine
  modified_base 7: mod_base = OTHER; note = 2'-O-methyl-guanosine
  modified_base 8: mod_base = OTHER; note = 2'-fluoro-guanosine
  modified_base 9: mod_base = OTHER; note = 2'-fluoro-adenosine
  modified_base 10: mod_base = OTHER; note = 2'-fluoro-uridine
  modified_base 11: mod_base = OTHER; note = 2'-fluoro-cytidine
  modified_base 12: mod_base = OTHER; note = 2'-O-methyl-cytidine
  modified_base 13: mod_base = OTHER; note = 2'-O-methyl-cytidine
  modified_base 14: mod_base = OTHER; note = 2'-O-methyl-adenosine
  modified_base 15: mod_base = OTHER; note = 2'-O-methyl-guanosine
  modified_base 16: mod_base = OTHER; note = 2'-O-methyl-uridine
  modified_base 17: mod_base = OTHER; note = 2'-O-methyl-guanosine
  modified_base 18: mod_base = OTHER; note = 2'-O-methyl-uridine with phosphorothioate linkage
  modified_base 19: mod_base = OTHER; note = 2'-O-methyl-cytidine with phosphorothioate linkage
  modified_base 20: mod_base = OTHER; note = 2'-O-methyl-adenosine
  modified_base 20: mod_base = OTHER; note = Nucleotide conjugated to 3 iterations of (2R,3R,4R,5S)-5-(3-(5-(((2R,3R,4R,5R,6R)- 3-acetamido-4,5-dihydroxy-6-(hydroxymethyl)tetrahydro-2H-py ran-2-yl)oxy) pentanamido)propyl)-2-((hydroxyl)methyl)-4-methoxytetrahydr ofuran-3-oxyl
taccatggatcccagtgtca

SEQ ID NO: 975 - RNA, 20 nt, synthetic construct
  source 1..20: mol_type = other RNA
  modified_base 1: mod_base = OTHER; note = 2'-O-methyl-cytidine with phosphorothioate linkage
  modified_base 2: mod_base = OTHER; note = 2'-O-methyl-cytidine with phosphorothioate linkage
  modified_base 3: mod_base = OTHER; note = 2'-O-methyl-adenosine
  modified_base 4: mod_base = OTHER; note = 2'-O-methyl-cytidine
  modified_base 5: mod_base = OTHER; note = 2'-O-methyl-cytidine
  modified_base 6: mod_base = OTHER; note = 2'-fluoro-adenosine
  modified_base 7: mod_base = OTHER; note = 2'-O-methyl-cytidine
  modified_base 8: mod_base = OTHER; note = 2'-fluoro-uridine
  modified_base 9: mod_base = OTHER; note = 2'-fluoro-guanosine
  modified_base 10: mod_base = OTHER; note = 2'-fluoro-uridine
  modified_base 11: mod_base = OTHER; note = 2'-fluoro-cytidine
  modified_base 12: mod_base = OTHER; note = 2'-O-methyl-adenosine
  modified_base 13: mod_base = OTHER; note = 2'-O-methyl-cytidine
  modified_base 14: mod_base = OTHER; note = 2'-O-methyl-adenosine
  modified_base 15: mod_base = OTHER; note = 2'-O-methyl-guanosine
  modified_base 16: mod_base = OTHER; note = 2'-O-methyl-guanosine
  modified_base 17: mod_base = OTHER; note = 2'-O-methyl-adenosine
  modified_base 18: mod_base = OTHER; note = 2'-O-methyl-adenosine with phosphorothioate linkage
  modified_base 19: mod_base = OTHER; note = 2'-O-methyl-guanosine with phosphorothioate linkage
  modified_base 20: mod_base = OTHER; note = 2'-O-methyl-adenosine
  modified_base 20: mod_base = OTHER; note = Nucleotide conjugated to 3 iterations of (2R,3R,4R,5S)-5-(3-(5-(((2R,3R,4R,5R,6R)- 3-acetamido-4,5-dihydroxy-6-(hydroxymethyl)tetrahydro-2H-py ran-2-yl)oxy) pentanamido)propyl)-2-((hydroxyl)methyl)-4-methoxytetrahydr ofuran-3-oxyl
ccaccactgtcacaggaaga

SEQ ID NO: 976 - RNA, 20 nt, synthetic construct
  source 1..20: mol_type = other RNA
  modified_base 1: mod_base = OTHER; note = 2'-O-methyl-adenosine with phosphorothioate linkage
  modified_base 2: mod_base = OTHER; note = 2'-O-methyl-uridine with phosphorothioate linkage
  modified_base 3: mod_base = OTHER; note = 2'-O-methyl-cytidine
  modified_base 4: mod_base = OTHER; note = 2'-O-methyl-cytidine
  modified_base 5: mod_base = OTHER; note = 2'-O-methyl-cytidine
  modified_base 6: mod_base = OTHER; note = 2'-fluoro-adenosine
  modified_base 7: mod_base = OTHER; note = 2'-O-methyl-guanosine
  modified_base 8: mod_base = OTHER; note = 2'-fluoro-uridine
  modified_base 9: mod_base = OTHER; note = 2'-fluoro-guanosine
  modified_base 10: mod_base = OTHER; note = 2'-fluoro-uridine
  modified_base 11: mod_base = OTHER; note = 2'-fluoro-cytidine
  modified_base 12: mod_base = OTHER; note = 2'-O-methyl-adenosine
  modified_base 13: mod_base = OTHER; note = 2'-O-methyl-guanosine
  modified_base 14: mod_base = OTHER; note = 2'-O-methyl-guanosine
  modified_base 15: mod_base = OTHER; note = 2'-O-methyl-uridine
  modified_base 16: mod_base = OTHER; note = 2'-O-methyl-guanosine
  modified_base 17: mod_base = OTHER; note = 2'-O-methyl-guanosine
  modified_base 18: mod_base = OTHER; note = 2'-O-methyl-guanosine with phosphorothioate linkage
  modified_base 19: mod_base = OTHER; note = 2'-O-methyl-adenosine with phosphorothioate linkage
  modified_base 20: mod_base = OTHER; note = 2'-O-methyl-adenosine
  modified_base 20: mod_base = OTHER; note = Nucleotide conjugated to 3 iterations of (2R,3R,4R,5S)-5-(3-(5-(((2R,3R,4R,5R,6R)- 3-acetamido-4,5-dihydroxy-6-(hydroxymethyl)tetrahydro-2H-py ran-2-yl)oxy) pentanamido)propyl)-2-((hydroxyl)methyl)-4-methoxytetrahydr ofuran-3-oxyl
atcccagtgtcaggtgggaa

SEQ ID NO: 977 - RNA, 20 nt, synthetic construct
  source 1..20: mol_type = other RNA
  modified_base 1: mod_base = OTHER; note = 2'-O-methyl-cytidine with phosphorothioate linkage
  modified_base 2: mod_base = OTHER; note = 2'-O-methyl-adenosine with phosphorothioate linkage
  modified_base 3: mod_base = OTHER; note = 2'-O-methyl-guanosine
  modified_base 4: mod_base = OTHER; note = 2'-O-methyl-adenosine
  modified_base 5: mod_base = OTHER; note = 2'-O-methyl-adenosine
  modified_base 6: mod_base = OTHER; note = 2'-fluoro-adenosine
  modified_base 7: mod_base = OTHER; note = 2'-O-methyl-adenosine
  modified_base 8: mod_base = OTHER; note = 2'-fluoro-cytidine
  modified_base 9: mod_base = OTHER; note = 2'-fluoro-uridine
  modified_base 10: mod_base = OTHER; note = 2'-fluoro-adenosine
  modified_base 11: mod_base = OTHER; note = 2'-fluoro-cytidine
  modified_base 12: mod_base = OTHER; note = 2'-O-methyl-cytidine
  modified_base 13: mod_base = OTHER; note = 2'-O-methyl-cytidine
  modified_base 14: mod_base = OTHER; note = 2'-O-methyl-adenosine
  modified_base 15: mod_base = OTHER; note = 2'-O-methyl-adenosine
  modified_base 16: mod_base = OTHER; note = 2'-O-methyl-adenosine
  modified_base 17: mod_base = OTHER; note = 2'-O-methyl-uridine
  modified_base 18: mod_base = OTHER; note = 2'-O-methyl-guanosine with phosphorothioate linkage
  modified_base 19: mod_base = OTHER; note = 2'-O-methyl-cytidine with phosphorothioate linkage
  modified_base 20: mod_base = OTHER; note = 2'-O-methyl-adenosine
  modified_base 20: mod_base = OTHER; note = Nucleotide conjugated to 3 iterations of (2R,3R,4R,5S)-5-(3-(5-(((2R,3R,4R,5R,6R)- 3-acetamido-4,5-dihydroxy-6-(hydroxymethyl)tetrahydro-2H-py ran-2-yl)oxy) pentanamido)propyl)-2-((hydroxyl)methyl)-4-methoxytetrahydr ofuran-3-oxyl
cagaaaactacccaaatgca

SEQ ID NO: 978 - RNA, 20 nt, synthetic construct
  source 1..20: mol_type = other RNA
  modified_base 1: mod_base = OTHER; note = 2'-O-methyl-cytidine with phosphorothioate linkage
  modified_base 2: mod_base = OTHER; note = 2'-O-methyl-cytidine with phosphorothioate linkage
  modified_base 3: mod_base = OTHER; note = 2'-O-methyl-cytidine
  modified_base 4: mod_base = OTHER; note = 2'-O-methyl-adenosine
  modified_base 5: mod_base = OTHER; note = 2'-O-methyl-adenosine
  modified_base 6: mod_base = OTHER; note = 2'-fluoro-adenosine
  modified_base 7: mod_base = OTHER; note = 2'-O-methyl-uridine
  modified_base 8: mod_base = OTHER; note = 2'-fluoro-guanosine
  modified_base 9: mod_base = OTHER; note = 2'-fluoro-cytidine
  modified_base 10: mod_base = OTHER; note = 2'-fluoro-uridine
  modified_base 11: mod_base = OTHER; note = 2'-fluoro-guanosine
  modified_base 12: mod_base = OTHER; note = 2'-O-methyl-guanosine
  modified_base 13: mod_base = OTHER; note = 2'-O-methyl-cytidine
  modified_base 14: mod_base = OTHER; note = 2'-O-methyl-uridine
  modified_base 15: mod_base = OTHER; note = 2'-O-methyl-uridine
  modified_base 16: mod_base = OTHER; note = 2'-O-methyl-guanosine
  modified_base 17: mod_base = OTHER; note = 2'-O-methyl-adenosine
  modified_base 18: mod_base = OTHER; note = 2'-O-methyl-uridine with phosphorothioate linkage
  modified_base 19: mod_base = OTHER; note = 2'-O-methyl-cytidine with phosphorothioate linkage
  modified_base 20: mod_base = OTHER; note = 2'-O-methyl-adenosine
  modified_base 20: mod_base = OTHER; note = Nucleotide conjugated to 3 iterations of (2R,3R,4R,5S)-5-(3-(5-(((2R,3R,4R,5R,6R)- 3-acetamido-4,5-dihydroxy-6-(hydroxymethyl)tetrahydro-2H-py ran-2-yl)oxy) pentanamido)propyl)-2-((hydroxyl)methyl)-4-methoxytetrahydr ofuran-3-oxyl
cccaaatgctggcttgatca

SEQ ID NO: 979 - RNA, 20 nt, synthetic construct
  source 1..20: mol_type = other RNA
  modified_base 1: mod_base = OTHER; note = 2'-O-methyl-uridine with phosphorothioate linkage
  modified_base 2: mod_base = OTHER; note = 2'-O-methyl-guanosine with phosphorothioate linkage
  modified_base 3: mod_base = OTHER; note = 2'-O-methyl-guanosine
  modified_base 4: mod_base = OTHER; note = 2'-O-methyl-guanosine
  modified_base 5: mod_base = OTHER; note = 2'-O-methyl-guanosine
  modified_base 6: mod_base = OTHER; note = 2'-fluoro-uridine
  modified_base 7: mod_base = OTHER; note = 2'-O-methyl-guanosine
  modified_base 8: mod_base = OTHER; note = 2'-fluoro-cytidine
  modified_base 9: mod_base = OTHER; note = 2'-fluoro-adenosine
  modified_base 10: mod_base = OTHER; note = 2'-fluoro-guanosine
  modified_base 11: mod_base = OTHER; note = 2'-fluoro-guanosine
  modified_base 12: mod_base = OTHER; note = 2'-O-methyl-adenosine
  modified_base 13: mod_base = OTHER; note = 2'-O-methyl-guanosine
  modified_base 14: mod_base = OTHER; note = 2'-O-methyl-uridine
  modified_base 15: mod_base = OTHER; note = 2'-O-methyl-guanosine
  modified_base 16: mod_base = OTHER; note = 2'-O-methyl-cytidine
  modified_base 17: mod_base = OTHER; note = 2'-O-methyl-uridine
  modified_base 18: mod_base = OTHER; note = 2'-O-methyl-adenosine with phosphorothioate linkage
  modified_base 19: mod_base = OTHER; note = 2'-O-methyl-cytidine with phosphorothioate linkage
  modified_base 20: mod_base = OTHER; note = 2'-O-methyl-adenosine
  modified_base 20: mod_base = OTHER; note = Nucleotide conjugated to 3 iterations of (2R,3R,4R,5S)-5-(3-(5-(((2R,3R,4R,5R,6R)- 3-acetamido-4,5-dihydroxy-6-(hydroxymethyl)tetrahydro-2H-py ran-2-yl)oxy) pentanamido)propyl)-2-((hydroxyl)methyl)-4-methoxytetrahydr ofuran-3-oxyl
tggggtgcaggagtgctaca

SEQ ID NO: 980 - RNA, 20 nt, synthetic construct
  source 1..20: mol_type = other RNA
  modified_base 1: mod_base = OTHER; note = 2'-O-methyl-adenosine with phosphorothioate linkage
  modified_base 2: mod_base = OTHER; note = 2'-O-methyl-cytidine with phosphorothioate linkage
  modified_base 3: mod_base = OTHER; note = 2'-O-methyl-cytidine
  modified_base 4: mod_base = OTHER; note = 2'-O-methyl-cytidine
  modified_base 5: mod_base = OTHER; note = 2'-O-methyl-cytidine
  modified_base 6: mod_base = OTHER; note = 2'-fluoro-adenosine
  modified_base 7: mod_base = OTHER; note = 2'-O-methyl-guanosine
  modified_base 8: mod_base = OTHER; note = 2'-fluoro-adenosine
  modified_base 9: mod_base = OTHER; note = 2'-fluoro-adenosine
  modified_base 10: mod_base = OTHER; note = 2'-fluoro-adenosine
  modified_base 11: mod_base = OTHER; note = 2'-fluoro-adenosine
  modified_base 12: mod_base = OTHER; note = 2'-O-methyl-cytidine
  modified_base 13: mod_base = OTHER; note = 2'-O-methyl-uridine
  modified_base 14: mod_base = OTHER; note = 2'-O-methyl-adenosine
  modified_base 15: mod_base = OTHER; note = 2'-O-methyl-cytidine
  modified_base 16: mod_base = OTHER; note = 2'-O-methyl-cytidine
  modified_base 17: mod_base = OTHER; note = 2'-O-methyl-cytidine
  modified_base 18: mod_base = OTHER; note = 2'-O-methyl-adenosine with phosphorothioate linkage
  modified_base 19: mod_base = OTHER; note = 2'-O-methyl-adenosine with phosphorothioate linkage
  modified_base 20: mod_base = OTHER; note = 2'-O-methyl-adenosine
  modified_base 20: mod_base = OTHER; note = Nucleotide conjugated to 3 iterations of (2R,3R,4R,5S)-5-(3-(5-(((2R,3R,4R,5R,6R)- 3-acetamido-4,5-dihydroxy-6-(hydroxymethyl)tetrahydro-2H-py ran-2-yl)oxy) pentanamido)propyl)-2-((hydroxyl)methyl)-4-methoxytetrahydr ofuran-3-oxyl
accccagaaaactacccaaa

SEQ ID NO: 981 - RNA, 20 nt, synthetic construct
  source 1..20: mol_type = other RNA
  modified_base 1: mod_base = OTHER; note = 2'-O-methyl-cytidine with phosphorothioate linkage
  modified_base 2: mod_base = OTHER; note = 2'-O-methyl-cytidine with phosphorothioate linkage
  modified_base 3: mod_base = OTHER; note = 2'-O-methyl-uridine
  modified_base 4: mod_base = OTHER; note = 2'-O-methyl-guanosine
  modified_base 5: mod_base = OTHER; note = 2'-O-methyl-adenosine
  modified_base 6: mod_base = OTHER; note = 2'-fluoro-cytidine
  modified_base 7: mod_base = OTHER; note = 2'-O-methyl-adenosine
  modified_base 8: mod_base = OTHER; note = 2'-fluoro-cytidine
  modified_base 9: mod_base = OTHER; note = 2'-fluoro-adenosine
  modified_base 10: mod_base = OTHER; note = 2'-fluoro-adenosine
  modified_base 11: mod_base = OTHER; note = 2'-fluoro-uridine
  modified_base 12: mod_base = OTHER; note = 2'-O-methyl-guanosine
  modified_base 13: mod_base = OTHER; note = 2'-O-methyl-cytidine
  modified_base 14: mod_base = OTHER; note = 2'-O-methyl-uridine
  modified_base 15: mod_base = OTHER; note = 2'-O-methyl-cytidine
  modified_base 16: mod_base = OTHER; note = 2'-O-methyl-adenosine
  modified_base 17: mod_base = OTHER; note = 2'-O-methyl-guanosine
  modified_base 18: mod_base = OTHER; note = 2'-O-methyl-adenosine with phosphorothioate linkage
  modified_base 19: mod_base = OTHER; note = 2'-O-methyl-cytidine with phosphorothioate linkage
  modified_base 20: mod_base = OTHER; note = 2'-O-methyl-adenosine
  modified_base 20: mod_base = OTHER; note = Nucleotide conjugated to 3 iterations of (2R,3R,4R,5S)-5-(3-(5-(((2R,3R,4R,5R,6R)- 3-acetamido-4,5-dihydroxy-6-(hydroxymethyl)tetrahydro-2H-py ran-2-yl)oxy) pentanamido)propyl)-2-((hydroxyl)methyl)-4-methoxytetrahydr ofuran-3-oxyl
cctgacacaatgctcagaca

SEQ ID NO: 982 - RNA, 20 nt, synthetic construct
  source 1..20: mol_type = other RNA
  modified_base 1: mod_base = OTHER; note = 2'-O-methyl-uridine with phosphorothioate linkage
  modified_base 2: mod_base = OTHER; note = 2'-O-methyl-guanosine with phosphorothioate linkage
  modified_base 3: mod_base = OTHER; note = 2'-O-methyl-guanosine
  modified_base 4: mod_base = OTHER; note = 2'-O-methyl-uridine
  modified_base 5: mod_base = OTHER; note = 2'-O-methyl-guanosine
  modified_base 6: mod_base = OTHER; note = 2'-fluoro-uridine
  modified_base 7: mod_base = OTHER; note = 2'-O-methyl-uridine
  modified_base 8: mod_base = OTHER; note = 2'-fluoro-adenosine
  modified_base 9: mod_base = OTHER; note = 2'-fluoro-uridine
  modified_base 10: mod_base = OTHER; note = 2'-fluoro-adenosine
  modified_base 11: mod_base = OTHER; note = 2'-fluoro-cytidine
  modified_base 12: mod_base = OTHER; note = 2'-O-methyl-cytidine
  modified_base 13: mod_base = OTHER; note = 2'-O-methyl-adenosine
  modified_base 14: mod_base = OTHER; note = 2'-O-methyl-uridine
  modified_base 15: mod_base = OTHER; note = 2'-O-methyl-guanosine
  modified_base 16: mod_base = OTHER; note = 2'-O-methyl-guanosine
  modified_base 17: mod_base = OTHER; note = 2'-O-methyl-adenosine
  modified_base 18: mod_base = OTHER; note = 2'-O-methyl-uridine with phosphorothioate linkage
  modified_base 19: mod_base = OTHER; note = 2'-O-methyl-cytidine with phosphorothioate linkage
  modified_base 20: mod_base = OTHER; note = 2'-O-methyl-adenosine
  modified_base 20: mod_base = OTHER; note = Nucleotide conjugated to 3 iterations of (2R,3R,4R,5S)-5-(3-(5-(((2R,3R,4R,5R,6R)- 3-acetamido-4,5-dihydroxy-6-(hydroxymethyl)tetrahydro-2H-py ran-2-yl)oxy) pentanamido)propyl)-2-((hydroxyl)methyl)-4-methoxytetrahydr ofuran-3-oxyl
tggtgttataccatggatca

SEQ ID NO: 983 - RNA, 20 nt, synthetic construct
  source 1..20: mol_type = other RNA
  modified_base 1: mod_base = OTHER; note = 2'-O-methyl-adenosine with phosphorothioate linkage
  modified_base 2: mod_base = OTHER; note = 2'-O-methyl-uridine with phosphorothioate linkage
  modified_base 3: mod_base = OTHER; note = 2'-O-methyl-guanosine
  modified_base 4: mod_base = OTHER; note = 2'-O-methyl-guanosine
  modified_base 5: mod_base = OTHER; note = 2'-O-methyl-adenosine
  modified_base 6: mod_base = OTHER; note = 2'-fluoro-uridine
  modified_base 7: mod_base = OTHER; note = 2'-O-methyl-cytidine
  modified_base 8: mod_base = OTHER; note = 2'-fluoro-cytidine
  modified_base 9: mod_base = OTHER; note = 2'-fluoro-cytidine
  modified_base 10: mod_base = OTHER; note = 2'-fluoro-adenosine
  modified_base 11: mod_base = OTHER; note = 2'-fluoro-guanosine
  modified_base 12: mod_base = OTHER; note = 2'-O-methyl-uridine
  modified_base 13: mod_base = OTHER; note = 2'-O-methyl-guanosine
  modified_base 14: mod_base = OTHER; note = 2'-O-methyl-uridine
  modified_base 15: mod_base = OTHER; note = 2'-O-methyl-cytidine
  modified_base 16: mod_base = OTHER; note = 2'-O-methyl-adenosine
  modified_base 17: mod_base = OTHER; note = 2'-O-methyl-guanosine
  modified_base 18: mod_base = OTHER; note = 2'-O-methyl-guanosine with phosphorothioate linkage
  modified_base 19: mod_base = OTHER; note = 2'-O-methyl-uridine with phosphorothioate linkage
  modified_base 20: mod_base = OTHER; note = 2'-O-methyl-adenosine
  modified_base 20: mod_base = OTHER; note = Nucleotide conjugated to 3 iterations of (2R,3R,4R,5S)-5-(3-(5-(((2R,3R,4R,5R,6R)- 3-acetamido-4,5-dihydroxy-6-(hydroxymethyl)tetrahydro-2H-py ran-2-yl)oxy) pentanamido)propyl)-2-((hydroxyl)methyl)-4-methoxytetrahydr ofuran-3-oxyl
atggatcccagtgtcaggta

SEQ ID NO: 984 - RNA, 20 nt, synthetic construct
  source 1..20: mol_type = other RNA
  modified_base 1: mod_base = OTHER; note = 2'-O-methyl-guanosine with phosphorothioate linkage
  modified_base 2: mod_base = OTHER; note = 2'-O-methyl-cytidine with phosphorothioate linkage
  modified_base 3: mod_base = OTHER; note = 2'-O-methyl-uridine
  modified_base 4: mod_base = OTHER; note = 2'-O-methyl-uridine
  modified_base 5: mod_base = OTHER; note = 2'-O-methyl-cytidine
  modified_base 6: mod_base = OTHER; note = 2'-fluoro-uridine
  modified_base 7: mod_base = OTHER; note = 2'-O-methyl-uridine
  modified_base 8: mod_base = OTHER; note = 2'-fluoro-cytidine
  modified_base 9: mod_base = OTHER; note = 2'-fluoro-uridine
  modified_base 10: mod_base = OTHER; note = 2'-fluoro-guanosine
  modified_base 11: mod_base = OTHER; note = 2'-fluoro-adenosine
  modified_base 12: mod_base = OTHER; note = 2'-O-methyl-adenosine
  modified_base 13: mod_base = OTHER; note = 2'-O-methyl-guanosine
  modified_base 14: mod_base = OTHER; note = 2'-O-methyl-adenosine
  modified_base 15: mod_base = OTHER; note = 2'-O-methyl-adenosine
  modified_base 16: mod_base = OTHER; note = 2'-O-methyl-guanosine
  modified_base 17: mod_base = OTHER; note = 2'-O-methyl-cytidine
  modified_base 18: mod_base = OTHER; note = 2'-O-methyl-adenosine with phosphorothioate linkage
  modified_base 19: mod_base = OTHER; note = 2'-O-methyl-cytidine with phosphorothioate linkage
  modified_base 20: mod_base = OTHER; note = 2'-O-methyl-adenosine
  modified_base 20: mod_base = OTHER; note = Nucleotide conjugated to 3 iterations of (2R,3R,4R,5S)-5-(3-(5-(((2R,3R,4R,5R,6R)- 3-acetamido-4,5-dihydroxy-6-(hydroxymethyl)tetrahydro-2H-py ran-2-yl)oxy) pentanamido)propyl)-2-((hydroxyl)methyl)-4-methoxytetrahydr ofuran-3-oxyl
gcttcttctgaagaagcaca

SEQ ID NO: 985 - RNA, 20 nt, synthetic construct
  source 1..20: mol_type = other RNA
  modified_base 1: mod_base = OTHER; note = 2'-O-methyl-adenosine with phosphorothioate linkage
  modified_base 2: mod_base = OTHER; note = 2'-O-methyl-uridine with phosphorothioate linkage
  modified_base 3: mod_base = OTHER; note = 2'-O-methyl-adenosine
  modified_base 4: mod_base = OTHER; note = 2'-O-methyl-guanosine
  modified_base 5: mod_base = OTHER; note = 2'-O-methyl-uridine
  modified_base 6: mod_base = OTHER; note = 2'-fluoro-cytidine
  modified_base 7: mod_base = OTHER; note = 2'-O-methyl-guanosine
  modified_base 8: mod_base = OTHER; note = 2'-fluoro-guanosine
  modified_base 9: mod_base = OTHER; note = 2'-fluoro-adenosine
  modified_base 10: mod_base = OTHER; note = 2'-fluoro-cytidine
  modified_base 11: mod_base = OTHER; note = 2'-fluoro-cytidine
  modified_base 12: mod_base = OTHER; note = 2'-O-methyl-cytidine
  modified_base 13: mod_base = OTHER; note = 2'-O-methyl-cytidine
  modified_base 14: mod_base = OTHER; note = 2'-O-methyl-adenosine
  modified_base 15: mod_base = OTHER; note = 2'-O-methyl-guanosine
  modified_base 16: mod_base = OTHER; note = 2'-O-methyl-adenosine
  modified_base 17: mod_base = OTHER; note = 2'-O-methyl-adenosine
  modified_base 18: mod_base = OTHER; note = 2'-O-methyl-adenosine with phosphorothioate linkage
  modified_base 19: mod_base = OTHER; note = 2'-O-methyl-adenosine with phosphorothioate linkage
  modified_base 20: mod_base = OTHER; note = 2'-O-methyl-adenosine
  modified_base 20: mod_base = OTHER; note = Nucleotide conjugated to 3 iterations of (2R,3R,4R,5S)-5-(3-(5-(((2R,3R,4R,5R,6R)- 3-acetamido-4,5-dihydroxy-6-(hydroxymethyl)tetrahydro-2H-py ran-2-yl)oxy) pentanamido)propyl)-2-((hydroxyl)methyl)-4-methoxytetrahydr ofuran-3-oxyl
atagtcggaccccagaaaaa

SEQ ID NO: 986 - RNA, 20 nt, synthetic construct
  source 1..20: mol_type = other RNA
  modified_base 1: mod_base = OTHER; note = 2'-O-methyl-uridine with phosphorothioate linkage
  modified_base 2: mod_base = OTHER; note = 2'-O-methyl-adenosine with phosphorothioate linkage
  modified_base 3: mod_base = OTHER; note = 2'-O-methyl-cytidine
  modified_base 4: mod_base = OTHER; note = 2'-O-methyl-cytidine
  modified_base 5: mod_base = OTHER; note = 2'-O-methyl-adenosine
  modified_base 6: mod_base = OTHER; note = 2'-fluoro-uridine
  modified_base 7: mod_base = OTHER; note = 2'-O-methyl-guanosine
  modified_base 8: mod_base = OTHER; note = 2'-fluoro-guanosine
  modified_base 9: mod_base = OTHER; note = 2'-fluoro-adenosine
  modified_base 10: mod_base = OTHER; note = 2'-fluoro-uridine
  modified_base 11: mod_base = OTHER; note = 2'-fluoro-cytidine
  modified_base 12: mod_base = OTHER; note = 2'-O-methyl-cytidine
  modified_base 13: mod_base = OTHER; note = 2'-O-methyl-cytidine
  modified_base 14: mod_base = OTHER; note = 2'-O-methyl-adenosine
  modified_base 15: mod_base = OTHER; note = 2'-O-methyl-adenosine
  modified_base 16: mod_base = OTHER; note = 2'-O-methyl-uridine
  modified_base 17: mod_base = OTHER; note = 2'-O-methyl-guanosine
  modified_base 18: mod_base = OTHER; note = 2'-O-methyl-uridine with phosphorothioate linkage
  modified_base 19: mod_base = OTHER; note = 2'-O-methyl-cytidine with phosphorothioate linkage
  modified_base 20: mod_base = OTHER; note = 2'-O-methyl-adenosine
  modified_base 20: mod_base = OTHER; note = Nucleotide conjugated to 3 iterations of (2R,3R,4R,5S)-5-(3-(5-(((2R,3R,4R,5R,6R)- 3-acetamido-4,5-dihydroxy-6-(hydroxymethyl)tetrahydro-2H-py ran-2-yl)oxy) pentanamido)propyl)-2-((hydroxyl)methyl)-4-methoxytetrahydr ofuran-3-oxyl
taccatggatcccaatgtca

SEQ ID NO: 987 - RNA, 20 nt, synthetic construct
  source 1..20: mol_type = other RNA
  modified_base 1: mod_base = OTHER; note = 2'-O-methyl-adenosine with phosphorothioate linkage
  modified_base 2: mod_base = OTHER; note = 2'-O-methyl-uridine with phosphorothioate linkage
  modified_base 3: mod_base = OTHER; note = 2'-O-methyl-cytidine
  modified_base 4: mod_base = OTHER; note = 2'-O-methyl-adenosine
  modified_base 5: mod_base = OTHER; note = 2'-O-methyl-guanosine
  modified_base 6: mod_base = OTHER; note = 2'-fluoro-adenosine
  modified_base 7: mod_base = OTHER; note = 2'-O-methyl-guanosine
  modified_base 8: mod_base = OTHER; note = 2'-fluoro-guanosine
  modified_base 9: mod_base = OTHER; note = 2'-fluoro-adenosine
  modified_base 10: mod_base = OTHER; note = 2'-fluoro-cytidine
  modified_base 11: mod_base = OTHER; note = 2'-fluoro-adenosine
  modified_base 12: mod_base = OTHER; note = 2'-O-methyl-adenosine
  modified_base 13: mod_base = OTHER; note = 2'-O-methyl-cytidine
  modified_base 14: mod_base = OTHER; note = 2'-O-methyl-adenosine
  modified_base 15: mod_base = OTHER; note = 2'-O-methyl-guanosine
  modified_base 16: mod_base = OTHER; note = 2'-O-methyl-adenosine
  modified_base 17: mod_base = OTHER; note = 2'-O-methyl-adenosine
  modified_base 18: mod_base = OTHER; note = 2'-O-methyl-uridine with phosphorothioate linkage
  modified_base 19: mod_base = OTHER; note = 2'-O-methyl-adenosine with phosphorothioate linkage
  modified_base 20: mod_base = OTHER; note = 2'-O-methyl-adenosine
  modified_base 20: mod_base = OTHER; note = Nucleotide conjugated to 3 iterations of (2R,3R,4R,5S)-5-(3-(5-(((2R,3R,4R,5R,6R)- 3-acetamido-4,5-dihydroxy-6-(hydroxymethyl)tetrahydro-2H-py ran-2-yl)oxy) pentanamido)propyl)-2-((hydroxyl)methyl)-4-methoxytetrahydr ofuran-3-oxyl
atcagaggacaacagaataa

SEQ ID NO: 988 - RNA, 20 nt, synthetic construct
  source 1..20: mol_type = other RNA
  modified_base 1: mod_base = OTHER; note = 2'-O-methyl-cytidine with phosphorothioate linkage
  modified_base 2: mod_base = OTHER; note = 2'-O-methyl-adenosine with phosphorothioate linkage
  modified_base 3: mod_base = OTHER; note = 2'-O-methyl-cytidine
  modified_base 4: mod_base = OTHER; note = 2'-O-methyl-adenosine
  modified_base 5: mod_base = OTHER; note = 2'-O-methyl-adenosine
  modified_base 6: mod_base = OTHER; note = 2'-fluoro-cytidine
  modified_base 7: mod_base = OTHER; note = 2'-O-methyl-uridine
  modified_base 8: mod_base = OTHER; note = 2'-fluoro-cytidine
  modified_base 9: mod_base = OTHER; note = 2'-fluoro-cytidine
  modified_base 10: mod_base = OTHER; note = 2'-fluoro-cytidine
  modified_base 11: mod_base = OTHER; note = 2'-fluoro-adenosine
  modified_base 12: mod_base = OTHER; note = 2'-O-methyl-cytidine
  modified_base 13: mod_base = OTHER; note = 2'-O-methyl-guanosine
  modified_base 14: mod_base = OTHER; note = 2'-O-methyl-guanosine
  modified_base 15: mod_base = OTHER; note = 2'-O-methyl-uridine
  modified_base 16: mod_base = OTHER; note = 2'-O-methyl-guanosine
  modified_base 17: mod_base = OTHER; note = 2'-O-methyl-guanosine
  modified_base 18: mod_base = OTHER; note = 2'-O-methyl-uridine with phosphorothioate linkage
  modified_base 19: mod_base = OTHER; note = 2'-O-methyl-cytidine with phosphorothioate linkage
  modified_base 20: mod_base = OTHER; note = 2'-O-methyl-adenosine
  modified_base 20: mod_base = OTHER; note = Nucleotide conjugated to 3 iterations of (2R,3R,4R,5S)-5-(3-(5-(((2R,3R,4R,5R,6R)- 3-acetamido-4,5-dihydroxy-6-(hydroxymethyl)tetrahydro-2H-py ran-2-yl)oxy) pentanamido)propyl)-2-((hydroxyl)methyl)-4-methoxytetrahydr ofuran-3-oxyl
cacaactcccacggtggtca

SEQ ID NO: 989 - RNA, 20 nt, synthetic construct
  source 1..20: mol_type = other RNA
  modified_base 1: mod_base = OTHER; note = 2'-O-methyl-guanosine with phosphorothioate linkage
  modified_base 2: mod_base = OTHER; note = 2'-O-methyl-adenosine with phosphorothioate linkage
  modified_base 3: mod_base = OTHER; note = 2'-O-methyl-guanosine
  modified_base 4: mod_base = OTHER; note = 2'-O-methyl-guanosine
  modified_base 5: mod_base = OTHER; note = 2'-O-methyl-cytidine
  modified_base 6: mod_base = OTHER; note = 2'-fluoro-uridine
  modified_base 7: mod_base = OTHER; note = 2'-O-methyl-cytidine
  modified_base 8: mod_base = OTHER; note = 2'-fluoro-cytidine
  modified_base 9: mod_base = OTHER; note = 2'-fluoro-uridine
  modified_base 10: mod_base = OTHER; note = 2'-fluoro-uridine
  modified_base 11: mod_base = OTHER; note = 2'-fluoro-cytidine
  modified_base 12: mod_base = OTHER; note = 2'-O-methyl-cytidine
  modified_base 13: mod_base = OTHER; note = 2'-O-methyl-guanosine
  modified_base 14: mod_base = OTHER; note = 2'-O-methyl-adenosine
  modified_base 15: mod_base = OTHER; note = 2'-O-methyl-adenosine
  modified_base 16: mod_base = OTHER; note = 2'-O-methyl-cytidine
  modified_base 17: mod_base = OTHER; note = 2'-O-methyl-adenosine
  modified_base 18: mod_base = OTHER; note = 2'-O-methyl-adenosine with phosphorothioate linkage
  modified_base 19: mod_base = OTHER; note = 2'-O-methyl-guanosine with phosphorothioate linkage
  modified_base 20: mod_base = OTHER; note = 2'-O-methyl-adenosine
  modified_base 20: mod_base = OTHER; note = Nucleotide conjugated to 3 iterations of (2R,3R,4R,5S)-5-(3-(5-(((2R,3R,4R,5R,6R)- 3-acetamido-4,5-dihydroxy-6-(hydroxymethyl)tetrahydro-2H-py ran-2-yl)oxy) pentanamido)propyl)-2-((hydroxyl)methyl)-4-methoxytetrahydr ofuran-3-oxyl
gaggctccttccgaacaaga

SEQ ID NO: 990 - RNA, 20 nt, synthetic construct
  source 1..20: mol_type = other RNA
  modified_base 1: mod_base = OTHER; note = 2'-O-methyl-guanosine with phosphorothioate linkage
  modified_base 2: mod_base = OTHER; note = 2'-O-methyl-cytidine with phosphorothioate linkage
  modified_base 3: mod_base = OTHER; note = 2'-O-methyl-adenosine
  modified_base 4: mod_base = OTHER; note = 2'-O-methyl-adenosine
  modified_base 5: mod_base = OTHER; note = 2'-O-methyl-cytidine
  modified_base 6: mod_base = OTHER; note = 2'-fluoro-cytidine
  modified_base 7: mod_base = OTHER; note = 2'-O-methyl-uridine
  modified_base 8: mod_base = OTHER; note = 2'-fluoro-guanosine
  modified_base 9: mod_base = OTHER; note = 2'-fluoro-adenosine
  modified_base 10: mod_base = OTHER; note = 2'-fluoro-cytidine
  modified_base 11: mod_base = OTHER; note = 2'-fluoro-adenosine
  modified_base 12: mod_base = OTHER; note = 2'-O-methyl-cytidine
  modified_base 13: mod_base = OTHER; note = 2'-O-methyl-adenosine
  modified_base 14: mod_base = OTHER; note = 2'-O-methyl-adenosine
  modified_base 15: mod_base = OTHER; note = 2'-O-methyl-uridine
  modified_base 16: mod_base = OTHER; note = 2'-O-methyl-guanosine
  modified_base 17: mod_base = OTHER; note = 2'-O-methyl-uridine
  modified_base 18: mod_base = OTHER; note = 2'-O-methyl-cytidine with phosphorothioate linkage
  modified_base 19: mod_base = OTHER; note = 2'-O-methyl-cytidine with phosphorothioate linkage
  modified_base 20: mod_base = OTHER; note = 2'-O-methyl-adenosine
  modified_base 20: mod_base = OTHER; note = Nucleotide conjugated to 3 iterations of (2R,3R,4R,5S)-5-(3-(5-(((2R,3R,4R,5R,6R)- 3-acetamido-4,5-dihydroxy-6-(hydroxymethyl)tetrahydro-2H-py ran-2-yl)oxy) pentanamido)propyl)-2-((hydroxyl)methyl)-4-methoxytetrahydr ofuran-3-oxyl
gcaacctgacacaatgtcca

SEQ ID NO: 991 - RNA, 20 nt, synthetic construct
  source 1..20: mol_type = other RNA
  modified_base 1: mod_base = OTHER; note = 2'-O-methyl-uridine with phosphorothioate linkage
  modified_base 2: mod_base = OTHER; note = 2'-O-methyl-cytidine with phosphorothioate linkage
  modified_base 3: mod_base = OTHER; note = 2'-O-methyl-cytidine
  modified_base 4: mod_base = OTHER; note = 2'-O-methyl-uridine
  modified_base 5: mod_base = OTHER; note = 2'-O-methyl-guanosine
  modified_base 6: mod_base = OTHER; note = 2'-fluoro-uridine
  modified_base 7: mod_base = OTHER; note = 2'-O-methyl-guanosine
  modified_base 8: mod_base = OTHER; note = 2'-fluoro-guanosine
  modified_base 9: mod_base = OTHER; note = 2'-fluoro-cytidine
  modified_base 10: mod_base = OTHER; note = 2'-fluoro-adenosine
  modified_base 11: mod_base = OTHER; note = 2'-fluoro-guanosine
  modified_base 12: mod_base = OTHER; note = 2'-O-methyl-cytidine
  modified_base 13: mod_base = OTHER; note = 2'-O-methyl-cytidine
  modified_base 14: mod_base = OTHER; note = 2'-O-methyl-cytidine
  modified_base 15: mod_base = OTHER; note = 2'-O-methyl-cytidine
  modified_base 16: mod_base = OTHER; note = 2'-O-methyl-uridine
  modified_base 17: mod_base = OTHER; note = 2'-O-methyl-uridine
  modified_base 18: mod_base = OTHER; note = 2'-O-methyl-adenosine with phosphorothioate linkage
  modified_base 19: mod_base = OTHER; note = 2'-O-methyl-uridine with phosphorothioate linkage
  modified_base 20: mod_base = OTHER; note = 2'-O-methyl-adenosine
  modified_base 20: mod_base = OTHER; note = Nucleotide conjugated to 3 iterations of (2R,3R,4R,5S)-5-(3-(5-(((2R,3R,4R,5R,6R)- 3-acetamido-4,5-dihydroxy-6-(hydroxymethyl)tetrahydro-2H-py ran-2-yl)oxy) pentanamido)propyl)-2-((hydroxyl)methyl)-4-methoxytetrahydr ofuran-3-oxyl
tcctgtggcagccccttata

SEQ ID NO: 992 - RNA, 20 nt, synthetic construct
  source 1..20: mol_type = other RNA
  modified_base 1: mod_base = OTHER; note = 2'-O-methyl-cytidine with phosphorothioate linkage
  modified_base 2: mod_base = OTHER; note = 2'-O-methyl-adenosine with phosphorothioate linkage
  modified_base 3: mod_base = OTHER; note = 2'-O-methyl-guanosine
  modified_base 4: mod_base = OTHER; note = 2'-O-methyl-guanosine
  modified_base 5: mod_base = OTHER; note = 2'-O-methyl-adenosine
  modified_base 6: mod_base = OTHER; note = 2'-fluoro-adenosine
  modified_base 7: mod_base = OTHER; note = 2'-O-methyl-guanosine
  modified_base 8: mod_base = OTHER; note = 2'-fluoro-guanosine
  modified_base 9: mod_base = OTHER; note = 2'-fluoro-adenosine
  modified_base 10: mod_base = OTHER; note = 2'-fluoro-cytidine
  modified_base 11: mod_base = OTHER; note = 2'-fluoro-cytidine
  modified_base 12: mod_base = OTHER; note = 2'-O-methyl-uridine
  modified_base 13: mod_base = OTHER; note = 2'-O-methyl-guanosine
  modified_base 14: mod_base = OTHER; note = 2'-O-methyl-cytidine
  modified_base 15: mod_base = OTHER; note = 2'-O-methyl-cytidine
  modified_base 16: mod_base = OTHER; note = 2'-O-methyl-adenosine
  modified_base 17: mod_base = OTHER; note = 2'-O-methyl-adenosine
  modified_base 18: mod_base = OTHER; note = 2'-O-methyl-guanosine with phosphorothioate linkage
  modified_base 19: mod_base = OTHER; note = 2'-O-methyl-cytidine with phosphorothioate linkage
  modified_base 20: mod_base = OTHER; note = 2'-O-methyl-adenosine
  modified_base 20: mod_base = OTHER; note = Nucleotide conjugated to 3 iterations of (2R,3R,4R,5S)-5-(3-(5-(((2R,3R,4R,5R,6R)- 3-acetamido-4,5-dihydroxy-6-(hydroxymethyl)tetrahydro-2H-py ran-2-yl)oxy) pentanamido)propyl)-2-((hydroxyl)methyl)-4-methoxytetrahydr ofuran-3-oxyl
caggaaggacctgccaagca

SEQ ID NO: 993 - RNA, 20 nt, synthetic construct
  source 1..20: mol_type = other RNA
  modified_base 1: mod_base = OTHER; note = 2'-O-methyl-adenosine with phosphorothioate linkage
  modified_base 2: mod_base = OTHER; note = 2'-O-methyl-adenosine with phosphorothioate linkage
  modified_base 3: mod_base = OTHER; note = 2'-O-methyl-uridine
  modified_base 4: mod_base = OTHER; note = 2'-O-methyl-cytidine
  modified_base 5: mod_base = OTHER; note = 2'-O-methyl-cytidine
  modified_base 6: mod_base = OTHER; note = 2'-fluoro-adenosine
  modified_base 7: mod_base = OTHER; note = 2'-O-methyl-guanosine
  modified_base 8: mod_base = OTHER; note = 2'-fluoro-adenosine
  modified_base 9: mod_base = OTHER; note = 2'-fluoro-uridine
  modified_base 10: mod_base = OTHER; note = 2'-fluoro-cytidine
  modified_base 11: mod_base = OTHER; note = 2'-fluoro-cytidine
  modified_base 12: mod_base = OTHER; note = 2'-O-methyl-uridine
  modified_base 13: mod_base = OTHER; note = 2'-O-methyl-guanosine
  modified_base 14: mod_base = OTHER; note = 2'-O-methyl-uridine
  modified_base 15: mod_base = OTHER; note = 2'-O-methyl-guanosine
  modified_base 16: mod_base = OTHER; note = 2'-O-methyl-guanosine
  modified_base 17: mod_base = OTHER; note = 2'-O-methyl-cytidine
  modified_base 18: mod_base = OTHER; note = 2'-O-methyl-adenosine with phosphorothioate linkage
  modified_base 19: mod_base = OTHER; note = 2'-O-methyl-guanosine with phosphorothioate linkage
  modified_base 20: mod_base = OTHER; note = 2'-O-methyl-adenosine
  modified_base 20: mod_base = OTHER; note = Nucleotide conjugated to 3 iterations of (2R,3R,4R,5S)-5-(3-(5-(((2R,3R,4R,5R,6R)- 3-acetamido-4,5-dihydroxy-6-(hydroxymethyl)tetrahydro-2H-py ran-2-yl)oxy) pentanamido)propyl)-2-((hydroxyl)methyl)-4-methoxytetrahydr ofuran-3-oxyl
aatccagatcctgtggcaga

SEQ ID NO: 994 - RNA, 20 nt, synthetic construct
  source 1..20: mol_type = other RNA
  modified_base 1: mod_base = OTHER; note = 2'-O-methyl-uridine with phosphorothioate linkage
  modified_base 2: mod_base = OTHER; note = 2'-O-methyl-adenosine with phosphorothioate linkage
  modified_base 3: mod_base = OTHER; note = 2'-O-methyl-cytidine
  modified_base 4: mod_base = OTHER; note = 2'-O-methyl-cytidine
  modified_base 5: mod_base = OTHER; note = 2'-O-methyl-cytidine
  modified_base 6: mod_base = OTHER; note = 2'-fluoro-adenosine
  modified_base 7: mod_base = OTHER; note = 2'-O-methyl-adenosine
  modified_base 8: mod_base = OTHER; note = 2'-fluoro-adenosine
  modified_base 9: mod_base = OTHER; note = 2'-fluoro-uridine
  modified_base 10: mod_base = OTHER; note = 2'-fluoro-guanosine
  modified_base 11: mod_base = OTHER; note = 2'-fluoro-cytidine
  modified_base 12: mod_base = OTHER; note = 2'-O-methyl-uridine
  modified_base 13: mod_base = OTHER; note = 2'-O-methyl-guanosine
  modified_base 14: mod_base = OTHER; note = 2'-O-methyl-guanosine
  modified_base 15: mod_base = OTHER; note = 2'-O-methyl-cytidine
  modified_base 16: mod_base = OTHER; note = 2'-O-methyl-uridine
  modified_base 17: mod_base = OTHER; note = 2'-O-methyl-uridine
  modified_base 18: mod_base = OTHER; note = 2'-O-methyl-guanosine with phosphorothioate linkage
  modified_base 19: mod_base = OTHER; note = 2'-O-methyl-adenosine with phosphorothioate linkage
  modified_base 20: mod_base = OTHER; note = 2'-O-methyl-adenosine
  modified_base 20: mod_base = OTHER; note = Nucleotide conjugated to 3 iterations of (2R,3R,4R,5S)-5-(3-(5-(((2R,3R,4R,5R,6R)- 3-acetamido-4,5-dihydroxy-6-(hydroxymethyl)tetrahydro-2H-py ran-2-yl)oxy) pentanamido)propyl)-2-((hydroxyl)methyl)-4-methoxytetrahydr ofuran-3-oxyl
tacccaaatgctggcttgaa

SEQ ID NO: 995 - RNA, 20 nt, synthetic construct
  source 1..20: mol_type = other RNA
  modified_base 1: mod_base = OTHER; note = 2'-O-methyl-guanosine with phosphorothioate linkage
  modified_base 2: mod_base = OTHER; note = 2'-O-methyl-guanosine with phosphorothioate linkage
  modified_base 3: mod_base = OTHER; note = 2'-O-methyl-adenosine
  modified_base 4: mod_base = OTHER; note = 2'-O-methyl-cytidine
  modified_base 5: mod_base = OTHER; note = 2'-O-methyl-adenosine
  modified_base 6: mod_base = OTHER; note = 2'-fluoro-guanosine
  modified_base 7: mod_base = OTHER; note = 2'-O-methyl-adenosine
  modified_base 8: mod_base = OTHER; note = 2'-fluoro-guanosine
  modified_base 9: mod_base = OTHER; note = 2'-fluoro-uridine
  modified_base 10: mod_base = OTHER; note = 2'-fluoro-uridine
  modified_base 11: mod_base = OTHER; note = 2'-fluoro-adenosine
  modified_base 12: mod_base = OTHER; note = 2'-O-methyl-uridine
  modified_base 13: mod_base = OTHER; note = 2'-O-methyl-cytidine
  modified_base 14: mod_base = OTHER; note = 2'-O-methyl-adenosine
  modified_base 15: mod_base = OTHER; note = 2'-O-methyl-adenosine
  modified_base 16: mod_base = OTHER; note = 2'-O-methyl-guanosine
  modified_base 17: mod_base = OTHER; note = 2'-O-methyl-guanosine
  modified_base 18: mod_base = OTHER; note = 2'-O-methyl-cytidine with phosphorothioate linkage
  modified_base 19: mod_base = OTHER; note = 2'-O-methyl-adenosine with phosphorothioate linkage
  modified_base 20: mod_base = OTHER; note = 2'-O-methyl-adenosine
  modified_base 20: mod_base = OTHER; note = Nucleotide conjugated to 3 iterations of (2R,3R,4R,5S)-5-(3-(5-(((2R,3R,4R,5R,6R)- 3-acetamido-4,5-dihydroxy-6-(hydroxymethyl)tetrahydro-2H-py ran-2-yl)oxy) pentanamido)propyl)-2-((hydroxyl)methyl)-4-methoxytetrahydr ofuran-3-oxyl
ggacagagttatcaaggcaa

SEQ ID NO: 996 - RNA, 20 nt, synthetic construct
  source 1..20: mol_type = other RNA
  modified_base 1: mod_base = OTHER; note = 2'-O-methyl-adenosine with phosphorothioate linkage
  modified_base 2: mod_base = OTHER; note = 2'-O-methyl-cytidine with phosphorothioate linkage
  modified_base 3: mod_base = OTHER; note = 2'-O-methyl-uridine
  modified_base 4: mod_base = OTHER; note = 2'-O-methyl-guanosine
  modified_base 5: mod_base = OTHER; note = 2'-O-methyl-adenosine
  modified_base 6: mod_base = OTHER; note = 2'-fluoro-guanosine
  modified_base 7: mod_base = OTHER; note = 2'-O-methyl-cytidine
  modified_base 8: mod_base = OTHER; note = 2'-fluoro-adenosine
  modified_base 9: mod_base = OTHER; note = 2'-fluoro-adenosine
  modified_base 10: mod_base = OTHER; note = 2'-fluoro-adenosine
  modified_base 11: mod_base = OTHER; note = 2'-fluoro-guanosine
  modified_base 12: mod_base = OTHER; note = 2'-O-methyl-guanosine
  modified_base 13: mod_base = OTHER; note = 2'-O-methyl-cytidine
  modified_base 14: mod_base = OTHER; note = 2'-O-methyl-cytidine
  modified_base 15: mod_base = OTHER; note = 2'-O-methyl-uridine
  modified_base 16: mod_base = OTHER; note = 2'-O-methyl-guanosine
  modified_base 17: mod_base = OTHER; note = 2'-O-methyl-guanosine
  modified_base 18: mod_base = OTHER; note = 2'-O-methyl-guanosine with phosphorothioate linkage
  modified_base 19: mod_base = OTHER; note = 2'-O-methyl-guanosine with phosphorothioate linkage
  modified_base 20: mod_base = OTHER; note = 2'-O-methyl-adenosine
  modified_base 20: mod_base = OTHER; note = Nucleotide conjugated to 3 iterations of (2R,3R,4R,5S)-5-(3-(5-(((2R,3R,4R,5R,6R)- 3-acetamido-4,5-dihydroxy-6-(hydroxymethyl)tetrahydro-2H-py ran-2-yl)oxy) pentanamido)propyl)-2-((hydroxyl)methyl)-4-methoxytetrahydr ofuran-3-oxyl
actgagcaaaggcctgggga

SEQ ID NO: 997 - RNA, 20 nt, synthetic construct
  source 1..20: mol_type = other RNA
  modified_base 1: mod_base = OTHER; note = 2'-O-methyl-cytidine with phosphorothioate linkage
  modified_base 2: mod_base = OTHER; note = 2'-O-methyl-adenosine with phosphorothioate linkage
  modified_base 3: mod_base = OTHER; note = 2'-O-methyl-cytidine
  modified_base 4: mod_base = OTHER; note = 2'-O-methyl-cytidine
  modified_base 5: mod_base = OTHER; note = 2'-O-methyl-adenosine
  modified_base 6: mod_base = OTHER; note = 2'-fluoro-cytidine
  modified_base 7: mod_base = OTHER; note = 2'-O-methyl-adenosine
  modified_base 8: mod_base = OTHER; note = 2'-fluoro-cytidine
  modified_base 9: mod_base = OTHER; note = 2'-fluoro-cytidine
  modified_base 10: mod_base = OTHER; note = 2'-fluoro-adenosine
  modified_base 11: mod_base = OTHER; note = 2'-fluoro-guanosine
  modified_base 12: mod_base = OTHER; note = 2'-O-methyl-cytidine
  modified_base 13: mod_base = OTHER; note = 2'-O-methyl-adenosine
  modified_base 14: mod_base = OTHER; note = 2'-O-methyl-uridine
  modified_base 15: mod_base = OTHER; note = 2'-O-methyl-adenosine
  modified_base 16: mod_base = OTHER; note = 2'-O-methyl-guanosine
  modified_base 17: mod_base = OTHER; note = 2'-O-methyl-uridine
  modified_base 18: mod_base = OTHER; note = 2'-O-methyl-cytidine with phosphorothioate linkage
  modified_base 19: mod_base = OTHER; note = 2'-O-methyl-guanosine with phosphorothioate linkage
  modified_base 20: mod_base = OTHER; note = 2'-O-methyl-adenosine
  modified_base 20: mod_base = OTHER; note = Nucleotide conjugated to 3 iterations of (2R,3R,4R,5S)-5-(3-(5-(((2R,3R,4R,5R,6R)- 3-acetamido-4,5-dihydroxy-6-(hydroxymethyl)tetrahydro-2H-py ran-2-yl)oxy) pentanamido)propyl)-2-((hydroxyl)methyl)-4-methoxytetrahydr ofuran-3-oxyl
caccacaccagcatagtcga

SEQ ID NO: 998 - RNA, 20 nt, synthetic construct
  source 1..20: mol_type = other RNA
  modified_base 1: mod_base = OTHER; note = 2'-O-methyl-cytidine with phosphorothioate linkage
  modified_base 2: mod_base = OTHER; note = 2'-O-methyl-adenosine with phosphorothioate linkage
  modified_base 3: mod_base = OTHER; note = 2'-O-methyl-guanosine
  modified_base 4: mod_base = OTHER; note = 2'-O-methyl-adenosine
  modified_base 5: mod_base = OTHER; note = 2'-O-methyl-uridine
  modified_base 6: mod_base = OTHER; note = 2'-fluoro-guanosine
  modified_base 7: mod_base = OTHER; note = 2'-O-methyl-cytidine
  modified_base 8: mod_base = OTHER; note = 2'-fluoro-uridine
  modified_base 9: mod_base = OTHER; note = 2'-fluoro-guanosine
  modified_base 10: mod_base = OTHER; note = 2'-fluoro-adenosine
  modified_base 11: mod_base = OTHER; note = 2'-fluoro-guanosine
  modified_base 12: mod_base = OTHER; note = 2'-O-methyl-adenosine
  modified_base 13: mod_base = OTHER; note = 2'-O-methyl-uridine
  modified_base 14: mod_base = OTHER; note = 2'-O-methyl-uridine
  modified_base 15: mod_base = OTHER; note = 2'-O-methyl-cytidine
  modified_base 16: mod_base = OTHER; note = 2'-O-methyl-guanosine
  modified_base 17: mod_base = OTHER; note = 2'-O-methyl-cytidine
  modified_base 18: mod_base = OTHER; note = 2'-O-methyl-cytidine with phosphorothioate linkage
  modified_base 19: mod_base = OTHER; note = 2'-O-methyl-cytidine with phosphorothioate linkage
  modified_base 20: mod_base = OTHER; note = 2'-O-methyl-adenosine
  modified_base 20: mod_base = OTHER; note = Nucleotide conjugated to 3 iterations of (2R,3R,4R,5S)-5-(3-(5-(((2R,3R,4R,5R,6R)- 3-acetamido-4,5-dihydroxy-6-(hydroxymethyl)tetrahydro-2H-py ran-2-yl)oxy) pentanamido)propyl)-2-((hydroxyl)methyl)-4-methoxytetrahydr ofuran-3-oxyl
cagatgctgagattcgccca

SEQ ID NO: 999 - RNA, 20 nt, synthetic construct
  source 1..20: mol_type = other RNA
  modified_base 1: mod_base = OTHER; note = 2'-O-methyl-guanosine with phosphorothioate linkage
  modified_base 2: mod_base = OTHER; note = 2'-O-methyl-cytidine with phosphorothioate linkage
  modified_base 3: mod_base = OTHER; note = 2'-O-methyl-adenosine
  modified_base 4: mod_base = OTHER; note = 2'-O-methyl-cytidine
  modified_base 5: mod_base = OTHER; note = 2'-O-methyl-cytidine
  modified_base 6: mod_base = OTHER; note = 2'-fluoro-adenosine
  modified_base 7: mod_base = OTHER; note = 2'-O-methyl-adenosine
  modified_base 8: mod_base = OTHER; note = 2'-fluoro-cytidine
  modified_base 9: mod_base = OTHER; note = 2'-fluoro-uridine
  modified_base 10: mod_base = OTHER; note = 2'-fluoro-guanosine
  modified_base 11: mod_base = OTHER; note = 2'-fluoro-adenosine
  modified_base 12: mod_base = OTHER; note = 2'-O-methyl-guanosine
  modified_base 13: mod_base = OTHER; note = 2'-O-methyl-cytidine
  modified_base 14: mod_base = OTHER; note = 2'-O-methyl-adenosine
  modified_base 15: mod_base = OTHER; note = 2'-O-methyl-adenosine
  modified_base 16: mod_base = OTHER; note = 2'-O-methyl-adenosine
  modified_base 17: mod_base = OTHER; note = 2'-O-methyl-guanosine
  modified_base 18: mod_base = OTHER; note = 2'-O-methyl-guanosine with phosphorothioate linkage
  modified_base 19: mod_base = OTHER; note = 2'-O-methyl-cytidine with phosphorothioate linkage
  modified_base 20: mod_base = OTHER; note = 2'-O-methyl-adenosine
  modified_base 20: mod_base = OTHER; note = Nucleotide conjugated to 3 iterations of (2R,3R,4R,5S)-5-(3-(5-(((2R,3R,4R,5R,6R)- 3-acetamido-4,5-dihydroxy-6-(hydroxymethyl)tetrahydro-2H-py ran-2-yl)oxy) pentanamido)propyl)-2-((hydroxyl)methyl)-4-methoxytetrahydr ofuran-3-oxyl
gcaccaactgagcaaaggca

SEQ ID NO: 1000 - RNA, 20 nt, synthetic construct
  source 1..20: mol_type = other RNA
  modified_base 1: mod_base = OTHER; note = 2'-O-methyl-adenosine with phosphorothioate linkage
  modified_base 2: mod_base = OTHER; note = 2'-O-methyl-uridine with phosphorothioate linkage
  modified_base 3: mod_base = OTHER; note = 2'-O-methyl-guanosine
  modified_base 4: mod_base = OTHER; note = 2'-O-methyl-adenosine
  modified_base 5: mod_base = OTHER; note = 2'-O-methyl-cytidine
  modified_base 6: mod_base = OTHER; note = 2'-fluoro-adenosine
  modified_base 7: mod_base = OTHER; note = 2'-O-methyl-cytidine
  modified_base 8: mod_base = OTHER; note = 2'-fluoro-cytidine
  modified_base 9: mod_base = OTHER; note = 2'-fluoro-adenosine
  modified_base 10: mod_base = OTHER; note = 2'-fluoro-cytidine
  modified_base 11: mod_base = OTHER; note = 2'-fluoro-adenosine
  modified_base 12: mod_base = OTHER; note = 2'-O-methyl-cytidine
  modified_base 13: mod_base = OTHER; note = 2'-O-methyl-cytidine
  modified_base 14: mod_base = OTHER; note = 2'-O-methyl-adenosine
  modified_base 15: mod_base = OTHER; note = 2'-O-methyl-guanosine
  modified_base 16: mod_base = OTHER; note = 2'-O-methyl-cytidine
  modified_base 17: mod_base = OTHER; note = 2'-O-methyl-adenosine
  modified_base 18: mod_base = OTHER; note = 2'-O-methyl-uridine with phosphorothioate linkage
  modified_base 19: mod_base = OTHER; note = 2'-O-methyl-adenosine with phosphorothioate linkage
  modified_base 20: mod_base = OTHER; note = 2'-O-methyl-adenosine
  modified_base 20: mod_base = OTHER; note = Nucleotide conjugated to 3 iterations of (2R,3R,4R,5S)-5-(3-(5-(((2R,3R,4R,5R,6R)- 3-acetamido-4,5-dihydroxy-6-(hydroxymethyl)tetrahydro-2H-py ran-2-yl)oxy) pentanamido)propyl)-2-((hydroxyl)methyl)-4-methoxytetrahydr ofuran-3-oxyl
atgacaccacaccagcataa

SEQ ID NO: 1001 - RNA, 20 nt, synthetic construct
  source 1..20: mol_type = other RNA
  modified_base 1: mod_base = OTHER; note = 2'-O-methyl-adenosine with phosphorothioate linkage
  modified_base 2: mod_base = OTHER; note = 2'-O-methyl-adenosine with phosphorothioate linkage
  modified_base 3: mod_base = OTHER; note = 2'-O-methyl-guanosine
  modified_base 4: mod_base = OTHER; note = 2'-O-methyl-adenosine
  modified_base 5: mod_base = OTHER; note = 2'-O-methyl-adenosine
  modified_base 6: mod_base = OTHER; note = 2'-fluoro-guanosine
  modified_base 7: mod_base = OTHER; note = 2'-O-methyl-cytidine
  modified_base 8: mod_base = OTHER; note = 2'-fluoro-adenosine
  modified_base 9: mod_base = OTHER; note = 2'-fluoro-cytidine
  modified_base 10: mod_base = OTHER; note = 2'-fluoro-cytidine
  modified_base 11: mod_base = OTHER; note = 2'-fluoro-adenosine
  modified_base 12: mod_base = OTHER; note = 2'-O-methyl-adenosine
  modified_base 13: mod_base = OTHER; note = 2'-O-methyl-cytidine
  modified_base 14: mod_base = OTHER; note = 2'-O-methyl-uridine
  modified_base 15: mod_base = OTHER; note = 2'-O-methyl-guanosine
  modified_base 16: mod_base = OTHER; note = 2'-O-methyl-adenosine
  modified_base 17: mod_base = OTHER; note = 2'-O-methyl-adenosine
  modified_base 18: mod_base = OTHER; note = 2'-O-methyl-adenosine with phosphorothioate linkage
  modified_base 19: mod_base = OTHER; note = 2'-O-methyl-adenosine with phosphorothioate linkage
  modified_base 20: mod_base = OTHER; note = 2'-O-methyl-adenosine
  modified_base 20: mod_base = OTHER; note = Nucleotide conjugated to 3 iterations of (2R,3R,4R,5S)-5-(3-(5-(((2R,3R,4R,5R,6R)- 3-acetamido-4,5-dihydroxy-6-(hydroxymethyl)tetrahydro-2H-py ran-2-yl)oxy) pentanamido)propyl)-2-((hydroxyl)methyl)-4-methoxytetrahydr ofuran-3-oxyl
aagaagcaccaactgaaaaa

SEQ ID NO: 1002 - RNA, 20 nt, synthetic construct
  source 1..20: mol_type = other RNA
  modified_base 1: mod_base = OTHER; note = 2'-O-methyl-guanosine with phosphorothioate linkage
  modified_base 2: mod_base = OTHER; note = 2'-O-methyl-uridine with phosphorothioate linkage
  modified_base 3: mod_base = OTHER; note = 2'-O-methyl-uridine
  modified_base 4: mod_base = OTHER; note = 2'-O-methyl-cytidine
  modified_base 5: mod_base = OTHER; note = 2'-O-methyl-cytidine
  modified_base 6: mod_base = OTHER; note = 2'-fluoro-adenosine
  modified_base 7: mod_base = OTHER; note = 2'-O-methyl-adenosine
  modified_base 8: mod_base = OTHER; note = 2'-fluoro-guanosine
  modified_base 9: mod_base = OTHER; note = 2'-fluoro-cytidine
  modified_base 10: mod_base = OTHER; note = 2'-fluoro-cytidine
  modified_base 11: mod_base = OTHER; note = 2'-fluoro-uridine
  modified_base 12: mod_base = OTHER; note = 2'-O-methyl-adenosine
  modified_base 13: mod_base = OTHER; note = 2'-O-methyl-guanosine
  modified_base 14: mod_base = OTHER; note = 2'-O-methyl-adenosine
  modified_base 15: mod_base = OTHER; note = 2'-O-methyl-guanosine
  modified_base 16: mod_base = OTHER; note = 2'-O-methyl-guanosine
  modified_base 17: mod_base = OTHER; note = 2'-O-methyl-cytidine
  modified_base 18: mod_base = OTHER; note = 2'-O-methyl-uridine with phosphorothioate linkage
  modified_base 19: mod_base = OTHER; note = 2'-O-methyl-cytidine with phosphorothioate linkage
  modified_base 20: mod_base = OTHER; note = 2'-O-methyl-adenosine
  modified_base 20: mod_base = OTHER; note = Nucleotide conjugated to 3 iterations of (2R,3R,4R,5S)-5-(3-(5-(((2R,3R,4R,5R,6R)- 3-acetamido-4,5-dihydroxy-6-(hydroxymethyl)tetrahydro-2H-py ran-2-yl)oxy) pentanamido)propyl)-2-((hydroxyl)methyl)-4-methoxytetrahydr ofuran-3-oxyl
gttccaagcctagaggctca

SEQ ID NO: 1003 - RNA, 20 nt, synthetic construct
  source 1..20: mol_type = other RNA
  modified_base 1: mod_base = OTHER; note = 2'-O-methyl-adenosine with phosphorothioate linkage
  modified_base 2: mod_base = OTHER; note = 2'-O-methyl-adenosine with phosphorothioate linkage
  modified_base 3: mod_base = OTHER; note = 2'-O-methyl-cytidine
  modified_base 4: mod_base = OTHER; note = 2'-O-methyl-cytidine
  modified_base 5: mod_base = OTHER; note = 2'-O-methyl-uridine
  modified_base 6: mod_base = OTHER; note = 2'-fluoro-guanosine
  modified_base 7: mod_base = OTHER; note = 2'-O-methyl-adenosine
  modified_base 8: mod_base = OTHER; note = 2'-fluoro-cytidine
  modified_base 9: mod_base = OTHER; note = 2'-fluoro-guanosine
  modified_base 10: mod_base = OTHER; note = 2'-fluoro-cytidine
  modified_base 11: mod_base = OTHER; note = 2'-fluoro-guanosine
  modified_base 12: mod_base = OTHER; note = 2'-O-methyl-adenosine
  modified_base 13: mod_base = OTHER; note = 2'-O-methyl-uridine
  modified_base 14: mod_base = OTHER; note = 2'-O-methyl-guanosine
  modified_base 15: mod_base = OTHER; note = 2'-O-methyl-cytidine
  modified_base 16: mod_base = OTHER; note = 2'-O-methyl-uridine
  modified_base 17: mod_base = OTHER; note = 2'-O-methyl-cytidine
  modified_base 18: mod_base = OTHER; note = 2'-O-methyl-adenosine with phosphorothioate linkage
  modified_base 19: mod_base = OTHER; note = 2'-O-methyl-guanosine with phosphorothioate linkage
  modified_base 20: mod_base = OTHER; note = 2'-O-methyl-adenosine
  modified_base 20: mod_base = OTHER; note = Nucleotide conjugated to 3 iterations of (2R,3R,4R,5S)-5-(3-(5-(((2R,3R,4R,5R,6R)- 3-acetamido-4,5-dihydroxy-6-(hydroxymethyl)tetrahydro-2H-py ran-2-yl)oxy) pentanamido)propyl)-2-((hydroxyl)methyl)-4-methoxytetrahydr ofuran-3-oxyl
aacctgacgcgatgctcaga

SEQ ID NO: 1004 - RNA, 20 nt, synthetic construct
  source 1..20: mol_type = other RNA
  modified_base 1: mod_base = OTHER; note = 2'-O-methyl-adenosine with phosphorothioate linkage
  modified_base 2: mod_base = OTHER; note = 2'-O-methyl-cytidine with phosphorothioate linkage
  modified_base 3: mod_base = OTHER; note = 2'-O-methyl-uridine
  modified_base 4: mod_base = OTHER; note = 2'-O-methyl-uridine
  modified_base 5: mod_base = OTHER; note = 2'-O-methyl-guanosine
  modified_base 6: mod_base = OTHER; note = 2'-fluoro-cytidine
  modified_base 7: mod_base = OTHER; note = 2'-O-methyl-cytidine
  modified_base 8: mod_base = OTHER; note = 2'-fluoro-adenosine
  modified_base 9: mod_base = OTHER; note = 2'-fluoro-adenosine
  modified_base 10: mod_base = OTHER; note = 2'-fluoro-guanosine
  modified_base 11: mod_base = OTHER; note = 2'-fluoro-cytidine
  modified_base 12: mod_base = OTHER; note = 2'-O-methyl-uridine
  modified_base 13: mod_base = OTHER; note = 2'-O-methyl-uridine
  modified_base 14: mod_base = OTHER; note = 2'-O-methyl-guanosine
  modified_base 15: mod_base = OTHER; note = 2'-O-methyl-guanosine
  modified_base 16: mod_base = OTHER; note = 2'-O-methyl-uridine
  modified_base 17: mod_base = OTHER; note = 2'-O-methyl-cytidine
  modified_base 18: mod_base = OTHER; note = 2'-O-methyl-adenosine with phosphorothioate linkage
  modified_base 19: mod_base = OTHER; note = 2'-O-methyl-uridine with phosphorothioate linkage
  modified_base 20: mod_base = OTHER; note = 2'-O-methyl-adenosine
  modified_base 20: mod_base = OTHER; note = Nucleotide conjugated to 3 iterations of (2R,3R,4R,5S)-5-(3-(5-(((2R,3R,4R,5R,6R)- 3-acetamido-4,5-dihydroxy-6-(hydroxymethyl)tetrahydro-2H-py ran-2-yl)oxy) pentanamido)propyl)-2-((hydroxyl)methyl)-4-methoxytetrahydr ofuran-3-oxyl
acttgccaagcttggtcata

SEQ ID NO: 1005 - RNA, 20 nt, synthetic construct
  source 1..20: mol_type = other RNA
  modified_base 1: mod_base = OTHER; note = 2'-O-methyl-adenosine with phosphorothioate linkage
  modified_base 2: mod_base = OTHER; note = 2'-O-methyl-cytidine with phosphorothioate linkage
  modified_base 3: mod_base = OTHER; note = 2'-O-methyl-adenosine
  modified_base 4: mod_base = OTHER; note = 2'-O-methyl-cytidine
  modified_base 5: mod_base = OTHER; note = 2'-O-methyl-uridine
  modified_base 6: mod_base = OTHER; note = 2'-fluoro-guanosine
  modified_base 7: mod_base = OTHER; note = 2'-O-methyl-guanosine
  modified_base 8: mod_base = OTHER; note = 2'-fluoro-cytidine
  modified_base 9: mod_base = OTHER; note = 2'-fluoro-adenosine
  modified_base 10: mod_base = OTHER; note = 2'-fluoro-uridine
  modified_base 11: mod_base = OTHER; note = 2'-fluoro-cytidine
  modified_base 12: mod_base = OTHER; note = 2'-O-methyl-adenosine
  modified_base 13: mod_base = OTHER; note = 2'-O-methyl-guanosine
  modified_base 14: mod_base = OTHER; note = 2'-O-methyl-adenosine
  modified_base 15: mod_base = OTHER; note = 2'-O-methyl-guanosine
  modified_base 16: mod_base = OTHER; note = 2'-O-methyl-guanosine
  modified_base 17: mod_base = OTHER; note = 2'-O-methyl-adenosine
  modified_base 18: mod_base = OTHER; note = 2'-O-methyl-cytidine with phosphorothioate linkage
  modified_base 19: mod_base = OTHER; note = 2'-O-methyl-adenosine with phosphorothioate linkage
  modified_base 20: mod_base = OTHER; note = 2'-O-methyl-adenosine
  modified_base 20: mod_base = OTHER; note = Nucleotide conjugated to 3 iterations of (2R,3R,4R,5S)-5-(3-(5-(((2R,3R,4R,5R,6R)- 3-acetamido-4,5-dihydroxy-6-(hydroxymethyl)tetrahydro-2H-py ran-2-yl)oxy) pentanamido)propyl)-2-((hydroxyl)methyl)-4-methoxytetrahydr ofuran-3-oxyl
acactggcatcagaggacaa

SEQ ID NO: 1006 - RNA, 20 nt, synthetic construct
  source 1..20: mol_type = other RNA
  modified_base 1: mod_base = OTHER; note = 2'-O-methyl-uridine with phosphorothioate linkage
  modified_base 2: mod_base = OTHER; note = 2'-O-methyl-guanosine with phosphorothioate linkage
  modified_base 3: mod_base = OTHER; note = 2'-O-methyl-cytidine
  modified_base 4: mod_base = OTHER; note = 2'-O-methyl-uridine
  modified_base 5: mod_base = OTHER; note = 2'-O-methyl-guanosine
  modified_base 6: mod_base = OTHER; note = 2'-fluoro-guanosine
  modified_base 7: mod_base = OTHER; note = 2'-O-methyl-cytidine
  modified_base 8: mod_base = OTHER; note = 2'-fluoro-cytidine
  modified_base 9: mod_base = OTHER; note = 2'-fluoro-uridine
  modified_base 10: mod_base = OTHER; note = 2'-fluoro-guanosine
  modified_base 11: mod_base = OTHER; note = 2'-fluoro-adenosine
  modified_base 12: mod_base = OTHER; note = 2'-O-methyl-cytidine
  modified_base 13: mod_base = OTHER; note = 2'-O-methyl-cytidine
  modified_base 14: mod_base = OTHER; note = 2'-O-methyl-adenosine
  modified_base 15: mod_base = OTHER; note = 2'-O-methyl-guanosine
  modified_base 16: mod_base = OTHER; note = 2'-O-methyl-guanosine
  modified_base 17: mod_base = OTHER; note = 2'-O-methyl-adenosine
  modified_base 18: mod_base = OTHER; note = 2'-O-methyl-adenosine with phosphorothioate linkage
  modified_base 19: mod_base = OTHER; note = 2'-O-methyl-cytidine with phosphorothioate linkage
  modified_base 20: mod_base = OTHER; note = 2'-O-methyl-adenosine
  modified_base 20: mod_base = OTHER; note = Nucleotide conjugated to 3 iterations of (2R,3R,4R,5S)-5-(3-(5-(((2R,3R,4R,5R,6R)- 3-acetamido-4,5-dihydroxy-6-(hydroxymethyl)tetrahydro-2H-py ran-2-yl)oxy) pentanamido)propyl)-2-((hydroxyl)methyl)-4-methoxytetrahydr ofuran-3-oxyl
tgctggcctgaccaggaaca

SEQ ID NO: 1007 - RNA, 20 nt, synthetic construct
  source 1..20: mol_type = other RNA
  modified_base 1: mod_base = OTHER; note = 2'-O-methyl-guanosine with phosphorothioate linkage
  modified_base 2: mod_base = OTHER; note = 2'-O-methyl-uridine with phosphorothioate linkage
  modified_base 3: mod_base = OTHER; note = 2'-O-methyl-uridine
  modified_base 4: mod_base = OTHER; note = 2'-O-methyl-adenosine
  modified_base 5: mod_base = OTHER; note = 2'-O-methyl-uridine
  modified_base 6: mod_base = OTHER; note = 2'-fluoro-adenosine
  modified_base 7: mod_base = OTHER; note = 2'-O-methyl-cytidine
  modified_base 8: mod_base = OTHER; note = 2'-fluoro-cytidine
  modified_base 9: mod_base = OTHER; note = 2'-fluoro-adenosine
  modified_base 10: mod_base = OTHER; note = 2'-fluoro-uridine
  modified_base 11: mod_base = OTHER; note = 2'-fluoro-guanosine
  modified_base 12: mod_base = OTHER; note = 2'-O-methyl-guanosine
  modified_base 13: mod_base = OTHER; note = 2'-O-methyl-adenosine
  modified_base 14: mod_base = OTHER; note = 2'-O-methyl-uridine
  modified_base 15: mod_base = OTHER; note = 2'-O-methyl-cytidine
  modified_base 16: mod_base = OTHER; note = 2'-O-methyl-cytidine
  modified_base 17: mod_base = OTHER; note = 2'-O-methyl-cytidine
  modified_base 18: mod_base = OTHER; note = 2'-O-methyl-adenosine with phosphorothioate linkage
  modified_base 19: mod_base = OTHER; note = 2'-O-methyl-guanosine with phosphorothioate linkage
  modified_base 20: mod_base = OTHER; note = 2'-O-methyl-adenosine
  modified_base 20: mod_base = OTHER; note = Nucleotide conjugated to 3 iterations of (2R,3R,4R,5S)-5-(3-(5-(((2R,3R,4R,5R,6R)- 3-acetamido-4,5-dihydroxy-6-(hydroxymethyl)tetrahydro-2H-py ran-2-yl)oxy) pentanamido)propyl)-2-((hydroxyl)methyl)-4-methoxytetrahydr ofuran-3-oxyl
gttataccatggatcccaga

SEQ ID NO: 1008 - RNA, 20 nt, synthetic construct
  source 1..20: mol_type = other RNA
  modified_base 1: mod_base = OTHER; note = 2'-O-methyl-cytidine with phosphorothioate linkage
  modified_base 2: mod_base = OTHER; note = 2'-O-methyl-adenosine with phosphorothioate linkage
  modified_base 3: mod_base = OTHER; note = 2'-O-methyl-adenosine
  modified_base 4: mod_base = OTHER; note = 2'-O-methyl-cytidine
  modified_base 5: mod_base = OTHER; note = 2'-O-methyl-uridine
  modified_base 6: mod_base = OTHER; note = 2'-fluoro-guanosine
  modified_base 7: mod_base = OTHER; note = 2'-O-methyl-adenosine
  modified_base 8: mod_base = OTHER; note = 2'-fluoro-guanosine
  modified_base 9: mod_base = OTHER; note = 2'-fluoro-cytidine
  modified_base 10: mod_base = OTHER; note = 2'-fluoro-adenosine
  modified_base 11: mod_base = OTHER; note = 2'-fluoro-adenosine
  modified_base 12: mod_base = OTHER; note = 2'-O-methyl-adenosine
  modified_base 13: mod_base = OTHER; note = 2'-O-methyl-guanosine
  modified_base 14: mod_base = OTHER; note = 2'-O-methyl-guanosine
  modified_base 15: mod_base = OTHER; note = 2'-O-methyl-cytidine
  modified_base 16: mod_base = OTHER; note = 2'-O-methyl-cytidine
  modified_base 17: mod_base = OTHER; note = 2'-O-methyl-uridine
  modified_base 18: mod_base = OTHER; note = 2'-O-methyl-guanosine with phosphorothioate linkage
  modified_base 19: mod_base = OTHER; note = 2'-O-methyl-guanosine with phosphorothioate linkage
  modified_base 20: mod_base = OTHER; note = 2'-O-methyl-adenosine
  modified_base 20: mod_base = OTHER; note = Nucleotide conjugated to 3 iterations of (2R,3R,4R,5S)-5-(3-(5-(((2R,3R,4R,5R,6R)- 3-acetamido-4,5-dihydroxy-6-(hydroxymethyl)tetrahydro-2H-py ran-2-yl)oxy) pentanamido)propyl)-2-((hydroxyl)methyl)-4-methoxytetrahydr ofuran-3-oxyl
caactgagcaaaggcctgga

SEQ ID NO: 1009 - RNA, 20 nt, synthetic construct
  source 1..20: mol_type = other RNA
  modified_base 1: mod_base = OTHER; note = 2'-O-methyl-cytidine with phosphorothioate linkage
  modified_base 2: mod_base = OTHER; note = 2'-O-methyl-adenosine with phosphorothioate linkage
  modified_base 3: mod_base = OTHER; note = 2'-O-methyl-guanosine
  modified_base 4: mod_base = OTHER; note = 2'-O-methyl-guanosine
  modified_base 5: mod_base = OTHER; note = 2'-O-methyl-uridine
  modified_base 6: mod_base = OTHER; note = 2'-fluoro-guanosine
  modified_base 7: mod_base = OTHER; note = 2'-O-methyl-guanosine
  modified_base 8: mod_base = OTHER; note = 2'-fluoro-guanosine
  modified_base 9: mod_base = OTHER; note = 2'-fluoro-adenosine
  modified_base 10: mod_base = OTHER; note = 2'-fluoro-guanosine
  modified_base 11: mod_base = OTHER; note = 2'-fluoro-uridine
  modified_base 12: mod_base = OTHER; note = 2'-O-methyl-adenosine
  modified_base 13: mod_base = OTHER; note = 2'-O-methyl-cytidine
  modified_base 14: mod_base = OTHER; note = 2'-O-methyl-uridine
  modified_base 15: mod_base = OTHER; note = 2'-O-methyl-guanosine
  modified_base 16: mod_base = OTHER; note = 2'-O-methyl-cytidine
  modified_base 17: mod_base = OTHER; note = 2'-O-methyl-adenosine
  modified_base 18: mod_base = OTHER; note = 2'-O-methyl-adenosine with phosphorothioate linkage
  modified_base 19: mod_base = OTHER; note = 2'-O-methyl-cytidine with phosphorothioate linkage
  modified_base 20: mod_base = OTHER; note = 2'-O-methyl-adenosine
  modified_base 20: mod_base = OTHER; note = Nucleotide conjugated to 3 iterations of (2R,3R,4R,5S)-5-(3-(5-(((2R,3R,4R,5R,6R)- 3-acetamido-4,5-dihydroxy-6-(hydroxymethyl)tetrahydro-2H-py ran-2-yl)oxy) pentanamido)propyl)-2-((hydroxyl)methyl)-4-methoxytetrahydr ofuran-3-oxyl
caggtgggagtactgcaaca

SEQ ID NO: 1010 - RNA, 20 nt, synthetic construct
  source 1..20: mol_type = other RNA
  modified_base 1: mod_base = OTHER; note = 2'-O-methyl-uridine with phosphorothioate linkage
  modified_base 2: mod_base = OTHER; note = 2'-O-methyl-uridine with phosphorothioate linkage
  modified_base 3: mod_base = OTHER; note = 2'-O-methyl-adenosine
  modified_base 4: mod_base = OTHER; note = 2'-O-methyl-uridine
  modified_base 5: mod_base = OTHER; note = 2'-O-methyl-cytidine
  modified_base 6: mod_base = OTHER; note = 2'-fluoro-guanosine
  modified_base 7: mod_base = OTHER; note = 2'-O-methyl-adenosine
  modified_base 8: mod_base = OTHER; note = 2'-fluoro-guanosine
  modified_base 9: mod_base = OTHER; note = 2'-fluoro-guanosine
  modified_base 10: mod_base = OTHER; note = 2'-fluoro-cytidine
  modified_base 11: mod_base = OTHER; note = 2'-fluoro-adenosine
  modified_base 12: mod_base = OTHER; note = 2'-O-methyl-cytidine
  modified_base 13: mod_base = OTHER; note = 2'-O-methyl-adenosine
  modified_base 14: mod_base = OTHER; note = 2'-O-methyl-uridine
  modified_base 15: mod_base = OTHER; note = 2'-O-methyl-uridine
  modified_base 16: mod_base = OTHER; note = 2'-O-methyl-cytidine
  modified_base 17: mod_base = OTHER; note = 2'-O-methyl-uridine
  modified_base 18: mod_base = OTHER; note = 2'-O-methyl-cytidine with phosphorothioate linkage
  modified_base 19: mod_base = OTHER; note = 2'-O-methyl-cytidine with phosphorothioate linkage
  modified_base 20: mod_base = OTHER; note = 2'-O-methyl-adenosine
  modified_base 20: mod_base = OTHER; note = Nucleotide conjugated to 3 iterations of (2R,3R,4R,5S)-5-(3-(5-(((2R,3R,4R,5R,6R)- 3-acetamido-4,5-dihydroxy-6-(hydroxymethyl)tetrahydro-2H-py ran-2-yl)oxy) pentanamido)propyl)-2-((hydroxyl)methyl)-4-methoxytetrahydr ofuran-3-oxyl
ttatcgaggcacattctcca

SEQ ID NO: 1011 - RNA, 20 nt, synthetic construct
  source 1..20: mol_type = other RNA
  modified_base 1: mod_base = OTHER; note = 2'-O-methyl-guanosine with phosphorothioate linkage
  modified_base 2: mod_base = OTHER; note = 2'-O-methyl-cytidine with phosphorothioate linkage
  modified_base 3: mod_base = OTHER; note = 2'-O-methyl-adenosine
  modified_base 4: mod_base = OTHER; note = 2'-O-methyl-adenosine
  modified_base 5: mod_base = OTHER; note = 2'-O-methyl-adenosine
  modified_base 6: mod_base = OTHER; note = 2'-fluoro-guanosine
  modified_base 7: mod_base = OTHER; note = 2'-O-methyl-cytidine
  modified_base 8: mod_base = OTHER; note = 2'-fluoro-cytidine
  modified_base 9: mod_base = OTHER; note = 2'-fluoro-cytidine
  modified_base 10: mod_base = OTHER; note = 2'-fluoro-cytidine
  modified_base 11: mod_base = OTHER; note = 2'-fluoro-guanosine
  modified_base 12: mod_base = OTHER; note = 2'-O-methyl-guanosine
  modified_base 13: mod_base = OTHER; note = 2'-O-methyl-guanosine
  modified_base 14: mod_base = OTHER; note = 2'-O-methyl-guanosine
  modified_base 15: mod_base = OTHER; note = 2'-O-methyl-uridine
  modified_base 16: mod_base = OTHER; note = 2'-O-methyl-cytidine
  modified_base 17: mod_base = OTHER; note = 2'-O-methyl-cytidine
  modified_base 18: mod_base = OTHER; note = 2'-O-methyl-adenosine with phosphorothioate linkage
  modified_base 19: mod_base = OTHER; note = 2'-O-methyl-guanosine with phosphorothioate linkage
  modified_base 20: mod_base = OTHER; note = 2'-O-methyl-adenosine
  modified_base 20: mod_base = OTHER; note = Nucleotide conjugated to 3 iterations of (2R,3R,4R,5S)-5-(3-(5-(((2R,3R,4R,5R,6R)- 3-acetamido-4,5-dihydroxy-6-(hydroxymethyl)tetrahydro-2H-py ran-2-yl)oxy) pentanamido)propyl)-2-((hydroxyl)methyl)-4-methoxytetrahydr ofuran-3-oxyl
gcaaagccccggggtccaga

SEQ ID NO: 1012 - RNA, 20 nt, synthetic construct
  source 1..20: mol_type = other RNA
  modified_base 1: mod_base = OTHER; note = 2'-O-methyl-adenosine with phosphorothioate linkage
  modified_base 2: mod_base = OTHER; note = 2'-O-methyl-cytidine with phosphorothioate linkage
  modified_base 3: mod_base = OTHER; note = 2'-O-methyl-cytidine
  modified_base 4: mod_base = OTHER; note = 2'-O-methyl-uridine
  modified_base 5: mod_base = OTHER; note = 2'-O-methyl-guanosine
  modified_base 6: mod_base = OTHER; note = 2'-fluoro-adenosine
  modified_base 7: mod_base = OTHER; note = 2'-O-methyl-guanosine
  modified_base 8: mod_base = OTHER; note = 2'-fluoro-cytidine
  modified_base 9: mod_base = OTHER; note = 2'-fluoro-adenosine
  modified_base 10: mod_base = OTHER; note = 2'-fluoro-adenosine
  modified_base 11: mod_base = OTHER; note = 2'-fluoro-adenosine
  modified_base 12: mod_base = OTHER; note = 2'-O-methyl-guanosine
  modified_base 13: mod_base = OTHER; note = 2'-O-methyl-cytidine
  modified_base 14: mod_base = OTHER; note = 2'-O-methyl-cytidine
  modified_base 15: mod_base = OTHER; note = 2'-O-methyl-adenosine
  modified_base 16: mod_base = OTHER; note = 2'-O-methyl-uridine
  modified_base 17: mod_base = OTHER; note = 2'-O-methyl-guanosine
  modified_base 18: mod_base = OTHER; note = 2'-O-methyl-uridine with phosphorothioate linkage
  modified_base 19: mod_base = OTHER; note = 2'-O-methyl-guanosine with phosphorothioate linkage
  modified_base 20: mod_base = OTHER; note = 2'-O-methyl-adenosine
  modified_base 20: mod_base = OTHER; note = Nucleotide conjugated to 3 iterations of (2R,3R,4R,5S)-5-(3-(5-(((2R,3R,4R,5R,6R)- 3-acetamido-4,5-dihydroxy-6-(hydroxymethyl)tetrahydro-2H-py ran-2-yl)oxy) pentanamido)propyl)-2-((hydroxyl)methyl)-4-methoxytetrahydr ofuran-3-oxyl
acctgagcaaagccatgtga

SEQ ID NO: 1013 - RNA, 20 nt, synthetic construct
  source 1..20: mol_type = other RNA
  modified_base 1: mod_base = OTHER; note = 2'-O-methyl-adenosine with phosphorothioate linkage
  modified_base 2: mod_base = OTHER; note = 2'-O-methyl-cytidine with phosphorothioate linkage
  modified_base 3: mod_base = OTHER; note = 2'-O-methyl-adenosine
  modified_base 4: mod_base = OTHER; note = 2'-O-methyl-cytidine
  modified_base 5: mod_base = OTHER; note = 2'-O-methyl-guanosine
  modified_base 6: mod_base = OTHER; note = 2'-fluoro-adenosine
  modified_base 7: mod_base = OTHER; note = 2'-O-methyl-uridine
  modified_base 8: mod_base = OTHER; note = 2'-fluoro-guanosine
  modified_base 9: mod_base = OTHER; note = 2'-fluoro-cytidine
  modified_base 10: mod_base = OTHER; note = 2'-fluoro-uridine
  modified_base 11: mod_base = OTHER; note = 2'-fluoro-cytidine
  modified_base 12: mod_base = OTHER; note = 2'-O-methyl-adenosine
  modified_base 13: mod_base = OTHER; note = 2'-O-methyl-guanosine
  modified_base 14: mod_base = OTHER; note = 2'-O-methyl-adenosine
  modified_base 15: mod_base = OTHER; note = 2'-O-methyl-uridine
  modified_base 16: mod_base = OTHER; note = 2'-O-methyl-guanosine
  modified_base 17: mod_base = OTHER; note = 2'-O-methyl-cytidine
  modified_base 18: mod_base = OTHER; note = 2'-O-methyl-adenosine with phosphorothioate linkage
  modified_base 19: mod_base = OTHER; note = 2'-O-methyl-guanosine with phosphorothioate linkage
  modified_base 20: mod_base = OTHER; note = 2'-O-methyl-adenosine
  modified_base 20: mod_base = OTHER; note = Nucleotide conjugated to 3 iterations of (2R,3R,4R,5S)-5-(3-(5-(((2R,3R,4R,5R,6R)- 3-acetamido-4,5-dihydroxy-6-(hydroxymethyl)tetrahydro-2H-py ran-2-yl)oxy) pentanamido)propyl)-2-((hydroxyl)methyl)-4-methoxytetrahydr ofuran-3-oxyl
acacgatgctcagatgcaga

SEQ ID NO: 1014 - RNA, 20 nt, synthetic construct
  source 1..20: mol_type = other RNA
  modified_base 1: mod_base = OTHER; note = 2'-O-methyl-guanosine with phosphorothioate linkage
  modified_base 2: mod_base = OTHER; note = 2'-O-methyl-adenosine with phosphorothioate linkage
  modified_base 3: mod_base = OTHER; note = 2'-O-methyl-cytidine
  modified_base 4: mod_base = OTHER; note = 2'-O-methyl-adenosine
  modified_base 5: mod_base = OTHER; note = 2'-O-methyl-uridine
  modified_base 6: mod_base = OTHER; note = 2'-fluoro-guanosine
  modified_base 7: mod_base = OTHER; note = 2'-O-methyl-uridine
  modified_base 8: mod_base = OTHER; note = 2'-fluoro-cytidine
  modified_base 9: mod_base = OTHER; note = 2'-fluoro-adenosine
  modified_base 10: mod_base = OTHER; note = 2'-fluoro-adenosine
  modified_base 11: mod_base = OTHER; note = 2'-fluoro-uridine
  modified_base 12: mod_base = OTHER; note = 2'-O-methyl-cytidine
  modified_base 13: mod_base = OTHER; note = 2'-O-methyl-uridine
  modified_base 14: mod_base = OTHER; note = 2'-O-methyl-uridine
  modified_base 15: mod_base = OTHER; note = 2'-O-methyl-guanosine
  modified_base 16: mod_base = OTHER; note = 2'-O-methyl-guanosine
  modified_base 17: mod_base = OTHER; note = 2'-O-methyl-uridine
  modified_base 18: mod_base = OTHER; note = 2'-O-methyl-cytidine with phosphorothioate linkage
  modified_base 19: mod_base = OTHER; note = 2'-O-methyl-adenosine with phosphorothioate linkage
  modified_base 20: mod_base = OTHER; note = 2'-O-methyl-adenosine
  modified_base 20: mod_base = OTHER; note = Nucleotide conjugated to 3 iterations of (2R,3R,4R,5S)-5-(3-(5-(((2R,3R,4R,5R,6R)- 3-acetamido-4,5-dihydroxy-6-(hydroxymethyl)tetrahydro-2H-py ran-2-yl)oxy) pentanamido)propyl)-2-((hydroxyl)methyl)-4-methoxytetrahydr ofuran-3-oxyl
gacatgtcaatcttggtcaa

SEQ ID NO: 1015 - RNA, 20 nt, synthetic construct
  source 1..20: mol_type = other RNA
  modified_base 1: mod_base = OTHER; note = 2'-O-methyl-cytidine with phosphorothioate linkage
  modified_base 2: mod_base = OTHER; note = 2'-O-methyl-adenosine with phosphorothioate linkage
  modified_base 3: mod_base = OTHER; note = 2'-O-methyl-guanosine
  modified_base 4: mod_base = OTHER; note = 2'-O-methyl-adenosine
  modified_base 5: mod_base = OTHER; note = 2'-O-methyl-uridine
  modified_base 6: mod_base = OTHER; note = 2'-fluoro-cytidine
  modified_base 7: mod_base = OTHER; note = 2'-O-methyl-cytidine
  modified_base 8: mod_base = OTHER; note = 2'-fluoro-uridine
  modified_base 9: mod_base = OTHER; note = 2'-fluoro-guanosine
  modified_base 10: mod_base = OTHER; note = 2'-fluoro-uridine
  modified_base 11: mod_base = OTHER; note = 2'-fluoro-guanosine
  modified_base 12: mod_base = OTHER; note = 2'-O-methyl-guanosine
  modified_base 13: mod_base = OTHER; note = 2'-O-methyl-cytidine
  modified_base 14: mod_base = OTHER; note = 2'-O-methyl-adenosine
  modified_base 15: mod_base = OTHER; note = 2'-O-methyl-guanosine
  modified_base 16: mod_base = OTHER; note = 2'-O-methyl-cytidine
  modified_base 17: mod_base = OTHER; note = 2'-O-methyl-cytidine
  modified_base 18: mod_base = OTHER; note = 2'-O-methyl-cytidine with phosphorothioate linkage
  modified_base 19: mod_base = OTHER; note = 2'-O-methyl-cytidine with phosphorothioate linkage
  modified_base 20: mod_base = OTHER; note = 2'-O-methyl-adenosine
  modified_base 20: mod_base = OTHER; note = Nucleotide conjugated to 3 iterations of (2R,3R,4R,5S)-5-(3-(5-(((2R,3R,4R,5R,6R)- 3-acetamido-4,5-dihydroxy-6-(hydroxymethyl)tetrahydro-2H-py ran-2-yl)oxy) pentanamido)propyl)-2-((hydroxyl)methyl)-4-methoxytetrahydr ofuran-3-oxyl
cagatcctgtggcagcccca

SEQ ID NO: 1016 - RNA, 20 nt, synthetic construct
  source 1..20: mol_type = other RNA
  modified_base 1: mod_base = OTHER; note = 2'-O-methyl-uridine with phosphorothioate linkage
  modified_base 2: mod_base = OTHER; note = 2'-O-methyl-cytidine with phosphorothioate linkage
  modified_base 3: mod_base = OTHER; note = 2'-O-methyl-cytidine
  modified_base 4: mod_base = OTHER; note = 2'-O-methyl-uridine
  modified_base 5: mod_base = OTHER; note = 2'-O-methyl-cytidine
  modified_base 6: mod_base = OTHER; note = 2'-fluoro-adenosine
  modified_base 7: mod_base = OTHER; note = 2'-O-methyl-cytidine
  modified_base 8: mod_base = OTHER; note = 2'-fluoro-adenosine
  modified_base 9: mod_base = OTHER; note = 2'-fluoro-adenosine
  modified_base 10: mod_base = OTHER; note = 2'-fluoro-cytidine
  modified_base 11: mod_base = OTHER; note = 2'-fluoro-uridine
  modified_base 12: mod_base = OTHER; note = 2'-O-methyl-cytidine
  modified_base 13: mod_base = OTHER; note = 2'-O-methyl-cytidine
  modified_base 14: mod_base = OTHER; note = 2'-O-methyl-cytidine
  modified_base 15: mod_base = OTHER; note = 2'-O-methyl-adenosine
  modified_base 16: mod_base = OTHER; note = 2'-O-methyl-cytidine
  modified_base 17: mod_base = OTHER; note = 2'-O-methyl-guanosine
  modified_base 18: mod_base = OTHER; note = 2'-O-methyl-guanosine with phosphorothioate linkage
  modified_base 19: mod_base = OTHER; note = 2'-O-methyl-uridine with phosphorothioate linkage
  modified_base 20: mod_base = OTHER; note = 2'-O-methyl-adenosine
  modified_base 20: mod_base = OTHER; note = Nucleotide conjugated to 3 iterations of (2R,3R,4R,5S)-5-(3-(5-(((2R,3R,4R,5R,6R)- 3-acetamido-4,5-dihydroxy-6-(hydroxymethyl)tetrahydro-2H-py ran-2-yl)oxy) pentanamido)propyl)-2-((hydroxyl)methyl)-4-methoxytetrahydr ofuran-3-oxyl
tcctcacaactcccacggta

SEQ ID NO: 1017 - RNA, 20 nt, synthetic construct
  source 1..20: mol_type = other RNA
  modified_base 1: mod_base = OTHER; note = 2'-O-methyl-adenosine with phosphorothioate linkage
  modified_base 2: mod_base = OTHER; note = 2'-O-methyl-guanosine with phosphorothioate linkage
  modified_base 3: mod_base = OTHER; note = 2'-O-methyl-cytidine
  modified_base 4: mod_base = OTHER; note = 2'-O-methyl-cytidine
  modified_base 5: mod_base = OTHER; note = 2'-O-methyl-uridine
  modified_base 6: mod_base = OTHER; note = 2'-fluoro-adenosine
  modified_base 7: mod_base = OTHER; note = 2'-O-methyl-guanosine
  modified_base 8: mod_base = OTHER; note = 2'-fluoro-adenosine
  modified_base 9: mod_base = OTHER; note = 2'-fluoro-guanosine
  modified_base 10: mod_base = OTHER; note = 2'-fluoro-guanosine
  modified_base 11: mod_base = OTHER; note = 2'-fluoro-cytidine
  modified_base 12: mod_base = OTHER; note = 2'-O-methyl-uridine
  modified_base 13: mod_base = OTHER; note = 2'-O-methyl-cytidine
  modified_base 14: mod_base = OTHER; note = 2'-O-methyl-cytidine
  modified_base 15: mod_base = OTHER; note = 2'-O-methyl-uridine
  modified_base 16: mod_base = OTHER; note = 2'-O-methyl-uridine
  modified_base 17: mod_base = OTHER; note = 2'-O-methyl-cytidine
  modified_base 18: mod_base = OTHER; note = 2'-O-methyl-uridine with phosphorothioate linkage
  modified_base 19: mod_base = OTHER; note = 2'-O-methyl-guanosine with phosphorothioate linkage
  modified_base 20: mod_base = OTHER; note = 2'-O-methyl-adenosine
  modified_base 20: mod_base = OTHER; note = Nucleotide conjugated to 3 iterations of (2R,3R,4R,5S)-5-(3-(5-(((2R,3R,4R,5R,6R)- 3-acetamido-4,5-dihydroxy-6-(hydroxymethyl)tetrahydro-2H-py ran-2-yl)oxy) pentanamido)propyl)-2-((hydroxyl)methyl)-4-methoxytetrahydr ofuran-3-oxyl
agcctagaggctccttctga

SEQ ID NO: 1018 - RNA, 20 nt, synthetic construct
  source 1..20: mol_type = other RNA
  modified_base 1: mod_base = OTHER; note = 2'-O-methyl-adenosine with phosphorothioate linkage
  modified_base 2: mod_base = OTHER; note = 2'-O-methyl-cytidine with phosphorothioate linkage
  modified_base 3: mod_base = OTHER; note = 2'-O-methyl-adenosine
  modified_base 4: mod_base = OTHER; note = 2'-O-methyl-adenosine
  modified_base 5: mod_base = OTHER; note = 2'-O-methyl-uridine
  modified_base 6: mod_base = OTHER; note = 2'-fluoro-guanosine
  modified_base 7: mod_base = OTHER; note = 2'-O-methyl-adenosine
  modified_base 8: mod_base = OTHER; note = 2'-fluoro-adenosine
  modified_base 9: mod_base = OTHER; note = 2'-fluoro-cytidine
  modified_base 10: mod_base = OTHER; note = 2'-fluoro-uridine
  modified_base 11: mod_base = OTHER; note = 2'-fluoro-adenosine
  modified_base 12: mod_base = OTHER; note = 2'-O-methyl-cytidine
  modified_base 13: mod_base = OTHER; note = 2'-O-methyl-uridine
  modified_base 14: mod_base = OTHER; note = 2'-O-methyl-guanosine
  modified_base 15: mod_base = OTHER; note = 2'-O-methyl-cytidine
  modified_base 16: mod_base = OTHER; note = 2'-O-methyl-adenosine
  modified_base 17: mod_base = OTHER; note = 2'-O-methyl-guanosine
  modified_base 18: mod_base = OTHER; note = 2'-O-methyl-guanosine with phosphorothioate linkage
  modified_base 19: mod_base = OTHER; note = 2'-O-methyl-adenosine with phosphorothioate linkage
  modified_base 20: mod_base = OTHER; note = 2'-O-methyl-adenosine
  modified_base 20: mod_base = OTHER; note = Nucleotide conjugated to 3 iterations of (2R,3R,4R,5S)-5-(3-(5-(((2R,3R,4R,5R,6R)- 3-acetamido-4,5-dihydroxy-6-(hydroxymethyl)tetrahydro-2H-py ran-2-yl)oxy) pentanamido)propyl)-2-((hydroxyl)methyl)-4-methoxytetrahydr ofuran-3-oxyl
acaatgaactactgcaggaa

SEQ ID NO: 1019 - RNA, 20 nt, synthetic construct
  source 1..20: mol_type = other RNA
  modified_base 1: mod_base = OTHER; note = 2'-O-methyl-guanosine with phosphorothioate linkage
  modified_base 2: mod_base = OTHER; note = 2'-O-methyl-uridine with phosphorothioate linkage
  modified_base 3: mod_base = OTHER; note = 2'-O-methyl-guanosine
  modified_base 4: mod_base = OTHER; note = 2'-O-methyl-adenosine
  modified_base 5: mod_base = OTHER; note = 2'-O-methyl-cytidine
  modified_base 6: mod_base = OTHER; note = 2'-fluoro-adenosine
  modified_base 7: mod_base = OTHER; note = 2'-O-methyl-guanosine
  modified_base 8: mod_base = OTHER; note = 2'-fluoro-adenosine
  modified_base 9: mod_base = OTHER; note = 2'-fluoro-adenosine
  modified_base 10: mod_base = OTHER; note = 2'-fluoro-uridine
  modified_base 11: mod_base = OTHER; note = 2'-fluoro-cytidine
  modified_base 12: mod_base = OTHER; note = 2'-O-methyl-adenosine
  modified_base 13: mod_base = OTHER; note = 2'-O-methyl-adenosine
  modified_base 14: mod_base = OTHER; note = 2'-O-methyl-guanosine
  modified_base 15: mod_base = OTHER; note = 2'-O-methyl-uridine
  modified_base 16: mod_base = OTHER; note = 2'-O-methyl-guanosine
  modified_base 17: mod_base = OTHER; note = 2'-O-methyl-uridine
  modified_base 18: mod_base = OTHER; note = 2'-O-methyl-cytidine with phosphorothioate linkage
  modified_base 19: mod_base = OTHER; note = 2'-O-methyl-cytidine with phosphorothioate linkage
  modified_base 20: mod_base = OTHER; note = 2'-O-methyl-adenosine
  modified_base 20: mod_base = OTHER; note = Nucleotide conjugated to 3 iterations of (2R,3R,4R,5S)-5-(3-(5-(((2R,3R,4R,5R,6R)- 3-acetamido-4,5-dihydroxy-6-(hydroxymethyl)tetrahydro-2H-py ran-2-yl)oxy) pentanamido)propyl)-2-((hydroxyl)methyl)-4-methoxytetrahydr ofuran-3-oxyl
gtgacagaatcaagtgtcca

SEQ ID NO: 1020 - RNA, 20 nt, synthetic construct
  source 1..20: mol_type = other RNA
  modified_base 1: mod_base = OTHER; note = 2'-O-methyl-cytidine with phosphorothioate linkage
  modified_base 2: mod_base = OTHER; note = 2'-O-methyl-adenosine with phosphorothioate linkage
  modified_base 3: mod_base = OTHER; note = 2'-O-methyl-cytidine
  modified_base 4: mod_base = OTHER; note = 2'-O-methyl-uridine
  modified_base 5: mod_base = OTHER; note = 2'-O-methyl-guanosine
  modified_base 6: mod_base = OTHER; note = 2'-fluoro-uridine
  modified_base 7: mod_base = OTHER; note = 2'-O-methyl-cytidine
  modified_base 8: mod_base = OTHER; note = 2'-fluoro-adenosine
  modified_base 9: mod_base = OTHER; note = 2'-fluoro-cytidine
  modified_base 10: mod_base = OTHER; note = 2'-fluoro-adenosine
  modified_base 11: mod_base = OTHER; note = 2'-fluoro-guanosine
  modified_base 12: mod_base = OTHER; note = 2'-O-methyl-guanosine
  modified_base 13: mod_base = OTHER; note = 2'-O-methyl-adenosine
  modified_base 14: mod_base = OTHER; note = 2'-O-methyl-adenosine
  modified_base 15: mod_base = OTHER; note = 2'-O-methyl-guanosine
  modified_base 16: mod_base = OTHER; note = 2'-O-methyl-guanosine
  modified_base 17: mod_base = OTHER; note = 2'-O-methyl-adenosine
  modified_base 18: mod_base = OTHER; note = 2'-O-methyl-cytidine with phosphorothioate linkage
  modified_base 19: mod_base = OTHER; note = 2'-O-methyl-cytidine with phosphorothioate linkage
  modified_base 20: mod_base = OTHER; note = 2'-O-methyl-adenosine
  modified_base 20: mod_base = OTHER; note = Nucleotide conjugated to 3 iterations of (2R,3R,4R,5S)-5-(3-(5-(((2R,3R,4R,5R,6R)- 3-acetamido-4,5-dihydroxy-6-(hydroxymethyl)tetrahydro-2H-py ran-2-yl)oxy) pentanamido)propyl)-2-((hydroxyl)methyl)-4-methoxytetrahydr ofuran-3-oxyl
cactgtcacaggaaggacca

SEQ ID NO: 1021 - RNA, 20 nt, synthetic construct
  source 1..20: mol_type = other RNA
  modified_base 1: mod_base = OTHER; note = 2'-O-methyl-uridine with phosphorothioate linkage
  modified_base 2: mod_base = OTHER; note = 2'-O-methyl-cytidine with phosphorothioate linkage
  modified_base 3: mod_base = OTHER; note = 2'-O-methyl-uridine
  modified_base 4: mod_base = OTHER; note = 2'-O-methyl-uridine
  modified_base 5: mod_base = OTHER; note = 2'-O-methyl-guanosine
  modified_base 6: mod_base = OTHER; note = 2'-fluoro-guanosine
  modified_base 7: mod_base = OTHER; note = 2'-O-methyl-uridine
  modified_base 8: mod_base = OTHER; note = 2'-fluoro-cytidine
  modified_base 9: mod_base = OTHER; note = 2'-fluoro-cytidine
  modified_base 10: mod_base = OTHER; note = 2'-fluoro-uridine
  modified_base 11: mod_base = OTHER; note = 2'-fluoro-cytidine
  modified_base 12: mod_base = OTHER; note = 2'-O-methyl-uridine
  modified_base 13: mod_base = OTHER; note = 2'-O-methyl-adenosine
  modified_base 14: mod_base = OTHER; note = 2'-O-methyl-uridine
  modified_base 15: mod_base = OTHER; note = 2'-O-methyl-guanosine
  modified_base 16: mod_base = OTHER; note = 2'-O-methyl-adenosine
  modified_base 17: mod_base = OTHER; note = 2'-O-methyl-cytidine
  modified_base 18: mod_base = OTHER; note = 2'-O-methyl-adenosine with phosphorothioate linkage
  modified_base 19: mod_base = OTHER; note = 2'-O-methyl-cytidine with phosphorothioate linkage
  modified_base 20: mod_base = OTHER; note = 2'-O-methyl-adenosine
  modified_base 20: mod_base = OTHER; note = Nucleotide conjugated to 3 iterations of (2R,3R,4R,5S)-5-(3-(5-(((2R,3R,4R,5R,6R)- 3-acetamido-4,5-dihydroxy-6-(hydroxymethyl)tetrahydro-2H-py ran-2-yl)oxy) pentanamido)propyl)-2-((hydroxyl)methyl)-4-methoxytetrahydr ofuran-3-oxyl
tcttggtcctctatgacaca

SEQ ID NO: 1022 - RNA, 20 nt, synthetic construct
  source 1..20: mol_type = other RNA
  modified_base 1: mod_base = OTHER; note = 2'-O-methyl-adenosine with phosphorothioate linkage
  modified_base 2: mod_base = OTHER; note = 2'-O-methyl-adenosine with phosphorothioate linkage
  modified_base 3: mod_base = OTHER; note = 2'-O-methyl-uridine
  modified_base 4: mod_base = OTHER; note = 2'-O-methyl-guanosine
  modified_base 5: mod_base = OTHER; note = 2'-O-methyl-cytidine
  modified_base 6: mod_base = OTHER; note = 2'-fluoro-uridine
  modified_base 7: mod_base = OTHER; note = 2'-O-methyl-cytidine
  modified_base 8: mod_base = OTHER; note = 2'-fluoro-adenosine
  modified_base 9: mod_base = OTHER; note = 2'-fluoro-guanosine
  modified_base 10: mod_base = OTHER; note = 2'-fluoro-adenosine
  modified_base 11: mod_base = OTHER; note = 2'-fluoro-cytidine
  modified_base 12: mod_base = OTHER; note = 2'-O-methyl-guanosine
  modified_base 13: mod_base = OTHER; note = 2'-O-methyl-cytidine
  modified_base 14: mod_base = OTHER; note = 2'-O-methyl-adenosine
  modified_base 15: mod_base = OTHER; note = 2'-O-methyl-guanosine
  modified_base 16: mod_base = OTHER; note = 2'-O-methyl-adenosine
  modified_base 17: mod_base = OTHER; note = 2'-O-methyl-adenosine
  modified_base 18: mod_base = OTHER; note = 2'-O-methyl-guanosine with phosphorothioate linkage
  modified_base 19: mod_base = OTHER; note = 2'-O-methyl-guanosine with phosphorothioate linkage
  modified_base 20: mod_base = OTHER; note = 2'-O-methyl-adenosine
  modified_base 20: mod_base = OTHER; note = Nucleotide conjugated to 3 iterations of (2R,3R,4R,5S)-5-(3-(5-(((2R,3R,4R,5R,6R)- 3-acetamido-4,5-dihydroxy-6-(hydroxymethyl)tetrahydro-2H-py ran-2-yl)oxy) pentanamido)propyl)-2-((hydroxyl)methyl)-4-methoxytetrahydr ofuran-3-oxyl
aatgctcagacgcagaagga

SEQ ID NO: 1023 - RNA, 20 nt, synthetic construct
  source 1..20: mol_type = other RNA
  modified_base 1: mod_base = OTHER; note = 2'-O-methyl-uridine with phosphorothioate linkage
  modified_base 2: mod_base = OTHER; note = 2'-O-methyl-guanosine with phosphorothioate linkage
  modified_base 3: mod_base = OTHER; note = 2'-O-methyl-adenosine
  modified_base 4: mod_base = OTHER; note = 2'-O-methyl-adenosine
  modified_base 5: mod_base = OTHER; note = 2'-O-methyl-cytidine
  modified_base 6: mod_base = OTHER; note = 2'-fluoro-uridine
  modified_base 7: mod_base = OTHER; note = 2'-O-methyl-adenosine
  modified_base 8: mod_base = OTHER; note = 2'-fluoro-cytidine
  modified_base 9: mod_base = OTHER; note = 2'-fluoro-uridine
  modified_base 10: mod_base = OTHER; note = 2'-fluoro-guanosine
  modified_base 11: mod_base = OTHER; note = 2'-fluoro-cytidine
  modified_base 12: mod_base = OTHER; note = 2'-O-methyl-adenosine
  modified_base 13: mod_base = OTHER; note = 2'-O-methyl-guanosine
  modified_base 14: mod_base = OTHER; note = 2'-O-methyl-guanosine
  modified_base 15: mod_base = OTHER; note = 2'-O-methyl-adenosine
  modified_base 16: mod_base = OTHER; note = 2'-O-methyl-adenosine
  modified_base 17: mod_base = OTHER; note = 2'-O-methyl-uridine
  modified_base 18: mod_base = OTHER; note = 2'-O-methyl-cytidine with phosphorothioate linkage
  modified_base 19: mod_base = OTHER; note = 2'-O-methyl-cytidine with phosphorothioate linkage
  modified_base 20: mod_base = OTHER; note = 2'-O-methyl-adenosine
  modified_base 20: mod_base = OTHER; note = Nucleotide conjugated to 3 iterations of (2R,3R,4R,5S)-5-(3-(5-(((2R,3R,4R,5R,6R)- 3-acetamido-4,5-dihydroxy-6-(hydroxymethyl)tetrahydro-2H-py ran-2-yl)oxy) pentanamido)propyl)-2-((hydroxyl)methyl)-4-methoxytetrahydr ofuran-3-oxyl
tgaactactgcaggaatcca

SEQ ID NO: 1024 - RNA, 20 nt, synthetic construct
  source 1..20: mol_type = other RNA
  modified_base 1: mod_base = OTHER; note = 2'-O-methyl-guanosine with phosphorothioate linkage
  modified_base 2: mod_base = OTHER; note = 2'-O-methyl-uridine with phosphorothioate linkage
  modified_base 3: mod_base = OTHER; note = 2'-O-methyl-guanosine
  modified_base 4: mod_base = OTHER; note = 2'-O-methyl-guanosine
  modified_base 5: mod_base = OTHER; note = 2'-O-methyl-uridine
  modified_base 6: mod_base = OTHER; note = 2'-fluoro-cytidine
  modified_base 7: mod_base = OTHER; note = 2'-O-methyl-cytidine
  modified_base 8: mod_base = OTHER; note = 2'-fluoro-adenosine
  modified_base 9: mod_base = OTHER; note = 2'-fluoro-guanosine
  modified_base 10: mod_base = OTHER; note = 2'-fluoro-guanosine
  modified_base 11: mod_base = OTHER; note = 2'-fluoro-adenosine
  modified_base 12: mod_base = OTHER; note = 2'-O-methyl-uridine
  modified_base 13: mod_base = OTHER; note = 2'-O-methyl-uridine
  modified_base 14: mod_base = OTHER; note = 2'-O-methyl-guanosine
  modified_base 15: mod_base = OTHER; note = 2'-O-methyl-cytidine
  modified_base 16: mod_base = OTHER; note = 2'-O-methyl-uridine
  modified_base 17: mod_base = OTHER; note = 2'-O-methyl-adenosine
  modified_base 18: mod_base = OTHER; note = 2'-O-methyl-cytidine with phosphorothioate linkage
  modified_base 19: mod_base = OTHER; note = 2'-O-methyl-cytidine with phosphorothioate linkage
  modified_base 20: mod_base = OTHER; note = 2'-O-methyl-adenosine
  modified_base 20: mod_base = OTHER; note = Nucleotide conjugated to 3 iterations of (2R,3R,4R,5S)-5-(3-(5-(((2R,3R,4R,5R,6R)- 3-acetamido-4,5-dihydroxy-6-(hydroxymethyl)tetrahydro-2H-py ran-2-yl)oxy) pentanamido)propyl)-2-((hydroxyl)methyl)-4-methoxytetrahydr ofuran-3-oxyl
gtggtccaggattgctacca

SEQ ID NO: 1025 - RNA, 20 nt, synthetic construct
  source 1..20: mol_type = other RNA
  modified_base 1: mod_base = OTHER; note = 2'-O-methyl-guanosine with phosphorothioate linkage
  modified_base 2: mod_base = OTHER; note = 2'-O-methyl-guanosine with phosphorothioate linkage
  modified_base 3: mod_base = OTHER; note = 2'-O-methyl-guanosine
  modified_base 4: mod_base = OTHER; note = 2'-O-methyl-uridine
  modified_base 5: mod_base = OTHER; note = 2'-O-methyl-guanosine
  modified_base 6: mod_base = OTHER; note = 2'-fluoro-cytidine
  modified_base 7: mod_base = OTHER; note = 2'-O-methyl-adenosine
  modified_base 8: mod_base = OTHER; note = 2'-fluoro-guanosine
  modified_base 9: mod_base = OTHER; note = 2'-fluoro-guanosine
  modified_base 10: mod_base = OTHER; note = 2'-fluoro-adenosine
  modified_base 11: mod_base = OTHER; note = 2'-fluoro-guanosine
  modified_base 12: mod_base = OTHER; note = 2'-O-methyl-uridine
  modified_base 13: mod_base = OTHER; note = 2'-O-methyl-guanosine
  modified_base 14: mod_base = OTHER; note = 2'-O-methyl-cytidine
  modified_base 15: mod_base = OTHER; note = 2'-O-methyl-uridine
  modified_base 16: mod_base = OTHER; note = 2'-O-methyl-adenosine
  modified_base 17: mod_base = OTHER; note = 2'-O-methyl-cytidine
  modified_base 18: mod_base = OTHER; note = 2'-O-methyl-cytidine with phosphorothioate linkage
  modified_base 19: mod_base = OTHER; note = 2'-O-methyl-adenosine with phosphorothioate linkage
  modified_base 20: mod_base = OTHER; note = 2'-O-methyl-adenosine
  modified_base 20: mod_base = OTHER; note = Nucleotide conjugated to 3 iterations of (2R,3R,4R,5S)-5-(3-(5-(((2R,3R,4R,5R,6R)- 3-acetamido-4,5-dihydroxy-6-(hydroxymethyl)tetrahydro-2H-py ran-2-yl)oxy) pentanamido)propyl)-2-((hydroxyl)methyl)-4-methoxytetrahydr ofuran-3-oxyl
gggtgcaggagtgctaccaa

SEQ ID NO: 1026 - RNA, 20 nt, synthetic construct
  source 1..20: mol_type = other RNA
  modified_base 1: mod_base = OTHER; note = 2'-O-methyl-adenosine with phosphorothioate linkage
  modified_base 2: mod_base = OTHER; note = 2'-O-methyl-uridine with phosphorothioate linkage
  modified_base 3: mod_base = OTHER; note = 2'-O-methyl-cytidine
  modified_base 4: mod_base = OTHER; note = 2'-O-methyl-uridine
  modified_base 5: mod_base = OTHER; note = 2'-O-methyl-adenosine
  modified_base 6: mod_base = OTHER; note = 2'-fluoro-uridine
  modified_base 7: mod_base = OTHER; note = 2'-O-methyl-guanosine
  modified_base 8: mod_base = OTHER; note = 2'-fluoro-adenosine
  modified_base 9: mod_base = OTHER; note = 2'-fluoro-cytidine
  modified_base 10: mod_base = OTHER; note = 2'-fluoro-adenosine
  modified_base 11: mod_base = OTHER; note = 2'-fluoro-cytidine
  modified_base 12: mod_base = OTHER; note = 2'-O-methyl-cytidine
  modified_base 13: mod_base = OTHER; note = 2'-O-methyl-adenosine
  modified_base 14: mod_base = OTHER; note = 2'-O-methyl-cytidine
  modified_base 15: mod_base = OTHER; note = 2'-O-methyl-adenosine
  modified_base 16: mod_base = OTHER; note = 2'-O-methyl-cytidine
  modified_base 17: mod_base = OTHER; note = 2'-O-methyl-cytidine
  modified_base 18: mod_base = OTHER; note = 2'-O-methyl-adenosine with phosphorothioate linkage
  modified_base 19: mod_base = OTHER; note = 2'-O-methyl-guanosine with phosphorothioate linkage
  modified_base 20: mod_base = OTHER; note = 2'-O-methyl-adenosine
  modified_base 20: mod_base = OTHER; note = Nucleotide conjugated to 3 iterations of (2R,3R,4R,5S)-5-(3-(5-(((2R,3R,4R,5R,6R)- 3-acetamido-4,5-dihydroxy-6-(hydroxymethyl)tetrahydro-2H-py ran-2-yl)oxy) pentanamido)propyl)-2-((hydroxyl)methyl)-4-methoxytetrahydr ofuran-3-oxyl
atctatgacaccacaccaga

SEQ ID NO: 1027 - RNA, 20 nt, synthetic construct
  source 1..20: mol_type = other RNA
  modified_base 1: mod_base = OTHER; note = 2'-O-methyl-adenosine with phosphorothioate linkage
  modified_base 2: mod_base = OTHER; note = 2'-O-methyl-adenosine with phosphorothioate linkage
  modified_base 3: mod_base = OTHER; note = 2'-O-methyl-uridine
  modified_base 4: mod_base = OTHER; note = 2'-O-methyl-cytidine
  modified_base 5: mod_base = OTHER; note = 2'-O-methyl-adenosine
  modified_base 6: mod_base = OTHER; note = 2'-fluoro-guanosine
  modified_base 7: mod_base = OTHER; note = 2'-O-methyl-guanosine
  modified_base 8: mod_base = OTHER; note = 2'-fluoro-uridine
  modified_base 9: mod_base = OTHER; note = 2'-fluoro-guanosine
  modified_base 10: mod_base = OTHER; note = 2'-fluoro-uridine
  modified_base 11: mod_base = OTHER; note = 2'-fluoro-cytidine
  modified_base 12: mod_base = OTHER; note = 2'-O-methyl-cytidine
  modified_base 13: mod_base = OTHER; note = 2'-O-methyl-uridine
  modified_base 14: mod_base = OTHER; note = 2'-O-methyl-adenosine
  modified_base 15: mod_base = OTHER; note = 2'-O-methyl-guanosine
  modified_base 16: mod_base = OTHER; note = 2'-O-methyl-adenosine
  modified_base 17: mod_base = OTHER; note = 2'-O-methyl-guanosine
  modified_base 18: mod_base = OTHER; note = 2'-O-methyl-adenosine with phosphorothioate linkage
  modified_base 19: mod_base = OTHER; note = 2'-O-methyl-cytidine with phosphorothioate linkage
  modified_base 20: mod_base = OTHER; note = 2'-O-methyl-adenosine
  modified_base 20: mod_base = OTHER; note = Nucleotide conjugated to 3 iterations of (2R,3R,4R,5S)-5-(3-(5-(((2R,3R,4R,5R,6R)- 3-acetamido-4,5-dihydroxy-6-(hydroxymethyl)tetrahydro-2H-py ran-2-yl)oxy) pentanamido)propyl)-2-((hydroxyl)methyl)-4-methoxytetrahydr ofuran-3-oxyl
aatcaggtgtcctagagaca

SEQ ID NO: 1028 - RNA, 20 nt, synthetic construct
  source 1..20: mol_type = other RNA
  modified_base 1: mod_base = OTHER; note = 2'-O-methyl-uridine with phosphorothioate linkage
  modified_base 2: mod_base = OTHER; note = 2'-O-methyl-cytidine with phosphorothioate linkage
  modified_base 3: mod_base = OTHER; note = 2'-O-methyl-cytidine
  modified_base 4: mod_base = OTHER; note = 2'-O-methyl-adenosine
  modified_base 5: mod_base = OTHER; note = 2'-O-methyl-guanosine
  modified_base 6: mod_base = OTHER; note = 2'-fluoro-guanosine
  modified_base 7: mod_base = OTHER; note = 2'-O-methyl-adenosine
  modified_base 8: mod_base = OTHER; note = 2'-fluoro-uridine
  modified_base 9: mod_base = OTHER; note = 2'-fluoro-uridine
  modified_base 10: mod_base = OTHER; note = 2'-fluoro-guanosine
  modified_base 11: mod_base = OTHER; note = 2'-fluoro-cytidine
  modified_base 12: mod_base = OTHER; note = 2'-O-methyl-uridine
  modified_base 13: mod_base = OTHER; note = 2'-O-methyl-adenosine
  modified_base 14: mod_base = OTHER; note = 2'-O-methyl-cytidine
  modified_base 15: mod_base = OTHER; note = 2'-O-methyl-cytidine
  modified_base 16: mod_base = OTHER; note = 2'-O-methyl-adenosine
  modified_base 17: mod_base = OTHER; note = 2'-O-methyl-uridine
  modified_base 18: mod_base = OTHER; note = 2'-O-methyl-guanosine with phosphorothioate linkage
  modified_base 19: mod_base = OTHER; note = 2'-O-methyl-guanosine with phosphorothioate linkage
  modified_base 20: mod_base = OTHER; note = 2'-O-methyl-adenosine
  modified_base 20: mod_base = OTHER; note = Nucleotide conjugated to 3 iterations of (2R,3R,4R,5S)-5-(3-(5-(((2R,3R,4R,5R,6R)- 3-acetamido-4,5-dihydroxy-6-(hydroxymethyl)tetrahydro-2H-py ran-2-yl)oxy) pentanamido)propyl)-2-((hydroxyl)methyl)-4-methoxytetrahydr ofuran-3-oxyl
tccaggattgctaccatgga

SEQ ID NO: 1029 - RNA, 20 nt, synthetic construct
  source 1..20: mol_type = other RNA
  modified_base 1: mod_base = OTHER; note = 2'-O-methyl-uridine with phosphorothioate linkage
  modified_base 2: mod_base = OTHER; note = 2'-O-methyl-guanosine with phosphorothioate linkage
  modified_base 3: mod_base = OTHER; note = 2'-O-methyl-adenosine
  modified_base 4: mod_base = OTHER; note = 2'-O-methyl-guanosine
  modified_base 5: mod_base = OTHER; note = 2'-O-methyl-cytidine
  modified_base 6: mod_base = OTHER; note = 2'-fluoro-adenosine
  modified_base 7: mod_base = OTHER; note = 2'-O-methyl-adenosine
  modified_base 8: mod_base = OTHER; note = 2'-fluoro-adenosine
  modified_base 9: mod_base = OTHER; note = 2'-fluoro-guanosine
  modified_base 10: mod_base = OTHER; note = 2'-fluoro-cytidine
  modified_base 11: mod_base = OTHER; note = 2'-fluoro-cytidine
  modified_base 12: mod_base = OTHER; note = 2'-O-methyl-adenosine
  modified_base 13: mod_base = OTHER; note = 2'-O-methyl-uridine
  modified_base 14: mod_base = OTHER; note = 2'-O-methyl-guanosine
  modified_base 15: mod_base = OTHER; note = 2'-O-methyl-uridine
  modified_base 16: mod_base = OTHER; note = 2'-O-methyl-guanosine
  modified_base 17: mod_base = OTHER; note = 2'-O-methyl-guanosine
  modified_base 18: mod_base = OTHER; note = 2'-O-methyl-uridine with phosphorothioate linkage
  modified_base 19: mod_base = OTHER; note = 2'-O-methyl-cytidine with phosphorothioate linkage
  modified_base 20: mod_base = OTHER; note = 2'-O-methyl-adenosine
  modified_base 20: mod_base = OTHER; note = Nucleotide conjugated to 3 iterations of (2R,3R,4R,5S)-5-(3-(5-(((2R,3R,4R,5R,6R)- 3-acetamido-4,5-dihydroxy-6-(hydroxymethyl)tetrahydro-2H-py ran-2-yl)oxy) pentanamido)propyl)-2-((hydroxyl)methyl)-4-methoxytetrahydr ofuran-3-oxyl
tgagcaaagccatgtggtca

SEQ ID NO: 1030 - RNA, 20 nt, synthetic construct
  source 1..20: mol_type = other RNA
  modified_base 1: mod_base = OTHER; note = 2'-O-methyl-cytidine with phosphorothioate linkage
  modified_base 2: mod_base = OTHER; note = 2'-O-methyl-uridine with phosphorothioate linkage
  modified_base 3: mod_base = OTHER; note = 2'-O-methyl-adenosine
  modified_base 4: mod_base = OTHER; note = 2'-O-methyl-cytidine
  modified_base 5: mod_base = OTHER; note = 2'-O-methyl-uridine
  modified_base 6: mod_base = OTHER; note = 2'-fluoro-guanosine
  modified_base 7: mod_base = OTHER; note = 2'-O-methyl-cytidine
  modified_base 8: mod_base = OTHER; note = 2'-fluoro-cytidine
  modified_base 9: mod_base = OTHER; note = 2'-fluoro-guanosine
  modified_base 10: mod_base = OTHER; note = 2'-fluoro-adenosine
  modified_base 11: mod_base = OTHER; note = 2'-fluoro-adenosine
  modified_base 12: mod_base = OTHER; note = 2'-O-methyl-adenosine
  modified_base 13: mod_base = OTHER; note = 2'-O-methyl-uridine
  modified_base 14: mod_base = OTHER; note = 2'-O-methyl-cytidine
  modified_base 15: mod_base = OTHER; note = 2'-O-methyl-cytidine
  modified_base 16: mod_base = OTHER; note = 2'-O-methyl-adenosine
  modified_base 17: mod_base = OTHER; note = 2'-O-methyl-guanosine
  modified_base 18: mod_base = OTHER; note = 2'-O-methyl-adenosine with phosphorothioate linkage
  modified_base 19: mod_base = OTHER; note = 2'-O-methyl-uridine with phosphorothioate linkage
  modified_base 20: mod_base = OTHER; note = 2'-O-methyl-adenosine
  modified_base 20: mod_base = OTHER; note = Nucleotide conjugated to 3 iterations of (2R,3R,4R,5S)-5-(3-(5-(((2R,3R,4R,5R,6R)- 3-acetamido-4,5-dihydroxy-6-(hydroxymethyl)tetrahydro-2H-py ran-2-yl)oxy) pentanamido)propyl)-2-((hydroxyl)methyl)-4-methoxytetrahydr ofuran-3-oxyl
ctactgccgaaatccagata

SEQ ID NO: 1031 - RNA, 20 nt, synthetic construct
  source 1..20: mol_type = other RNA
  modified_base 1: mod_base = OTHER; note = 2'-O-methyl-uridine with phosphorothioate linkage
  modified_base 2: mod_base = OTHER; note = 2'-O-methyl-guanosine with phosphorothioate linkage
  modified_base 3: mod_base = OTHER; note = 2'-O-methyl-adenosine
  modified_base 4: mod_base = OTHER; note = 2'-O-methyl-guanosine
  modified_base 5: mod_base = OTHER; note = 2'-O-methyl-cytidine
  modified_base 6: mod_base = OTHER; note = 2'-fluoro-adenosine
  modified_base 7: mod_base = OTHER; note = 2'-O-methyl-adenosine
  modified_base 8: mod_base = OTHER; note = 2'-fluoro-adenosine
  modified_base 9: mod_base = OTHER; note = 2'-fluoro-guanosine
  modified_base 10: mod_base = OTHER; note = 2'-fluoro-guanosine
  modified_base 11: mod_base = OTHER; note = 2'-fluoro-cytidine
  modified_base 12: mod_base = OTHER; note = 2'-O-methyl-cytidine
  modified_base 13: mod_base = OTHER; note = 2'-O-methyl-uridine
  modified_base 14: mod_base = OTHER; note = 2'-O-methyl-guanosine
  modified_base 15: mod_base = OTHER; note = 2'-O-methyl-guanosine
  modified_base 16: mod_base = OTHER; note = 2'-O-methyl-guanosine
  modified_base 17: mod_base = OTHER; note = 2'-O-methyl-guanosine
  modified_base 18: mod_base = OTHER; note = 2'-O-methyl-uridine with phosphorothioate linkage
  modified_base 19: mod_base = OTHER; note = 2'-O-methyl-guanosine with phosphorothioate linkage
  modified_base 20: mod_base = OTHER; note = 2'-O-methyl-adenosine
  modified_base 20: mod_base = OTHER; note = Nucleotide conjugated to 3 iterations of (2R,3R,4R,5S)-5-(3-(5-(((2R,3R,4R,5R,6R)- 3-acetamido-4,5-dihydroxy-6-(hydroxymethyl)tetrahydro-2H-py ran-2-yl)oxy) pentanamido)propyl)-2-((hydroxyl)methyl)-4-methoxytetrahydr ofuran-3-oxyl
tgagcaaaggcctggggtga

SEQ ID NO: 1032 - RNA, 20 nt, synthetic construct
  source 1..20: mol_type = other RNA
  modified_base 1: mod_base = OTHER; note = 2'-O-methyl-adenosine with phosphorothioate linkage
  modified_base 2: mod_base = OTHER; note = 2'-O-methyl-guanosine with phosphorothioate linkage
  modified_base 3: mod_base = OTHER; note = 2'-O-methyl-cytidine
  modified_base 4: mod_base = OTHER; note = 2'-O-methyl-adenosine
  modified_base 5: mod_base = OTHER; note = 2'-O-methyl-adenosine
  modified_base 6: mod_base = OTHER; note = 2'-fluoro-adenosine
  modified_base 7: mod_base = OTHER; note = 2'-O-methyl-guanosine
  modified_base 8: mod_base = OTHER; note = 2'-fluoro-guanosine
  modified_base 9: mod_base = OTHER; note = 2'-fluoro-cytidine
  modified_base 10: mod_base = OTHER; note = 2'-fluoro-cytidine
  modified_base 11: mod_base = OTHER; note = 2'-fluoro-uridine
  modified_base 12: mod_base = OTHER; note = 2'-O-methyl-guanosine
  modified_base 13: mod_base = OTHER; note = 2'-O-methyl-guanosine
  modified_base 14: mod_base = OTHER; note = 2'-O-methyl-guanosine
  modified_base 15: mod_base = OTHER; note = 2'-O-methyl-guanosine
  modified_base 16: mod_base = OTHER; note = 2'-O-methyl-uridine
  modified_base 17: mod_base = OTHER; note = 2'-O-methyl-guanosine
  modified_base 18: mod_base = OTHER; note = 2'-O-methyl-cytidine with phosphorothioate linkage
  modified_base 19: mod_base = OTHER; note = 2'-O-methyl-adenosine with phosphorothioate linkage
  modified_base 20: mod_base = OTHER; note = 2'-O-methyl-adenosine
  modified_base 20: mod_base = OTHER; note = Nucleotide conjugated to 3 iterations of (2R,3R,4R,5S)-5-(3-(5-(((2R,3R,4R,5R,6R)- 3-acetamido-4,5-dihydroxy-6-(hydroxymethyl)tetrahydro-2H-py ran-2-yl)oxy) pentanamido)propyl)-2-((hydroxyl)methyl)-4-methoxytetrahydr ofuran-3-oxyl
agcaaaggcctggggtgcaa

SEQ ID NO: 1033 - RNA, 20 nt, synthetic construct
  source 1..20: mol_type = other RNA
  modified_base 1: mod_base = OTHER; note = 2'-O-methyl-uridine with phosphorothioate linkage
  modified_base 2: mod_base = OTHER; note = 2'-O-methyl-guanosine with phosphorothioate linkage
  modified_base 3: mod_base = OTHER; note = 2'-O-methyl-uridine
  modified_base 4: mod_base = OTHER; note = 2'-O-methyl-cytidine
  modified_base 5: mod_base = OTHER; note = 2'-O-methyl-adenosine
  modified_base 6: mod_base = OTHER; note = 2'-fluoro-adenosine
  modified_base 7: mod_base = OTHER; note = 2'-O-methyl-uridine
  modified_base 8: mod_base = OTHER; note = 2'-fluoro-cytidine
  modified_base 9: mod_base = OTHER; note = 2'-fluoro-uridine
  modified_base 10: mod_base = OTHER; note = 2'-fluoro-uridine
  modified_base 11: mod_base = OTHER; note = 2'-fluoro-guanosine
  modified_base 12: mod_base = OTHER; note = 2'-O-methyl-guanosine
  modified_base 13: mod_base = OTHER; note = 2'-O-methyl-uridine
  modified_base 14: mod_base = OTHER; note = 2'-O-methyl-cytidine
  modified_base 15: mod_base = OTHER; note = 2'-O-methyl-adenosine
  modified_base 16: mod_base = OTHER; note = 2'-O-methyl-uridine
  modified_base 17: mod_base = OTHER; note = 2'-O-methyl-cytidine
  modified_base 18: mod_base = OTHER; note = 2'-O-methyl-cytidine with phosphorothioate linkage
  modified_base 19: mod_base = OTHER; note = 2'-O-methyl-adenosine with phosphorothioate linkage
  modified_base 20: mod_base = OTHER; note = 2'-O-methyl-adenosine
  modified_base 20: mod_base = OTHER; note = Nucleotide conjugated to 3 iterations of (2R,3R,4R,5S)-5-(3-(5-(((2R,3R,4R,5R,6R)- 3-acetamido-4,5-dihydroxy-6-(hydroxymethyl)tetrahydro-2H-py ran-2-yl)oxy) pentanamido)propyl)-2-((hydroxyl)methyl)-4-methoxytetrahydr ofuran-3-oxyl
tgtcaatcttggtcatccaa

SEQ ID NO: 1034 - RNA, 20 nt, synthetic construct
  source 1..20: mol_type = other RNA
  modified_base 1: mod_base = OTHER; note = 2'-O-methyl-adenosine with phosphorothioate linkage
  modified_base 2: mod_base = OTHER; note = 2'-O-methyl-adenosine with phosphorothioate linkage
  modified_base 3: mod_base = OTHER; note = 2'-O-methyl-guanosine
  modified_base 4: mod_base = OTHER; note = 2'-O-methyl-cytidine
  modified_base 5: mod_base = OTHER; note = 2'-O-methyl-adenosine
  modified_base 6: mod_base = OTHER; note = 2'-fluoro-cytidine
  modified_base 7: mod_base = OTHER; note = 2'-O-methyl-cytidine
  modified_base 8: mod_base = OTHER; note = 2'-fluoro-adenosine
  modified_base 9: mod_base = OTHER; note = 2'-fluoro-adenosine
  modified_base 10: mod_base = OTHER; note = 2'-fluoro-cytidine
  modified_base 11: mod_base = OTHER; note = 2'-fluoro-uridine
  modified_base 12: mod_base = OTHER; note = 2'-O-methyl-guanosine
  modified_base 13: mod_base = OTHER; note = 2'-O-methyl-adenosine
  modified_base 14: mod_base = OTHER; note = 2'-O-methyl-adenosine
  modified_base 15: mod_base = OTHER; note = 2'-O-methyl-adenosine
  modified_base 16: mod_base = OTHER; note = 2'-O-methyl-adenosine
  modified_base 17: mod_base = OTHER; note = 2'-O-methyl-cytidine
  modified_base 18: mod_base = OTHER; note = 2'-O-methyl-adenosine with phosphorothioate linkage
  modified_base 19: mod_base = OTHER; note = 2'-O-methyl-guanosine with phosphorothioate linkage
  modified_base 20: mod_base = OTHER; note = 2'-O-methyl-adenosine
  modified_base 20: mod_base = OTHER; note = Nucleotide conjugated to 3 iterations of (2R,3R,4R,5S)-5-(3-(5-(((2R,3R,4R,5R,6R)- 3-acetamido-4,5-dihydroxy-6-(hydroxymethyl)tetrahydro-2H-py ran-2-yl)oxy) pentanamido)propyl)-2-((hydroxyl)methyl)-4-methoxytetrahydr ofuran-3-oxyl
aagcaccaactgaaaacaga

SEQ ID NO: 1035 - RNA, 20 nt, synthetic construct
  source 1..20: mol_type = other RNA
  modified_base 1: mod_base = OTHER; note = 2'-O-methyl-guanosine with phosphorothioate linkage
  modified_base 2: mod_base = OTHER; note = 2'-O-methyl-guanosine with phosphorothioate linkage
  modified_base 3: mod_base = OTHER; note = 2'-O-methyl-adenosine
  modified_base 4: mod_base = OTHER; note = 2'-O-methyl-adenosine
  modified_base 5: mod_base = OTHER; note = 2'-O-methyl-adenosine
  modified_base 6: mod_base = OTHER; note = 2'-fluoro-cytidine
  modified_base 7: mod_base = OTHER; note = 2'-O-methyl-cytidine
  modified_base 8: mod_base = OTHER; note = 2'-fluoro-cytidine
  modified_base 9: mod_base = OTHER; note = 2'-fluoro-cytidine
  modified_base 10: mod_base = OTHER; note = 2'-fluoro-cytidine
  modified_base 11: mod_base = OTHER; note = 2'-fluoro-guanosine
  modified_base 12: mod_base = OTHER; note = 2'-O-methyl-guanosine
  modified_base 13: mod_base = OTHER; note = 2'-O-methyl-guanosine
  modified_base 14: mod_base = OTHER; note = 2'-O-methyl-guanosine
  modified_base 15: mod_base = OTHER; note = 2'-O-methyl-uridine
  modified_base 16: mod_base = OTHER; note = 2'-O-methyl-adenosine
  modified_base 17: mod_base = OTHER; note = 2'-O-methyl-cytidine
  modified_base 18: mod_base = OTHER; note = 2'-O-methyl-adenosine with phosphorothioate linkage
  modified_base 19: mod_base = OTHER; note = 2'-O-methyl-guanosine with phosphorothioate linkage
  modified_base 20: mod_base = OTHER; note = 2'-O-methyl-adenosine
  modified_base 20: mod_base = OTHER; note = Nucleotide conjugated to 3 iterations of (2R,3R,4R,5S)-5-(3-(5-(((2R,3R,4R,5R,6R)- 3-acetamido-4,5-dihydroxy-6-(hydroxymethyl)tetrahydro-2H-py ran-2-yl)oxy) pentanamido)propyl)-2-((hydroxyl)methyl)-4-methoxytetrahydr ofuran-3-oxyl
ggaaacccccggggtacaga

SEQ ID NO: 1036 - RNA, 20 nt, synthetic construct
  source 1..20: mol_type = other RNA
  modified_base 1: mod_base = OTHER; note = 2'-O-methyl-guanosine with phosphorothioate linkage
  modified_base 2: mod_base = OTHER; note = 2'-O-methyl-guanosine with phosphorothioate linkage
  modified_base 3: mod_base = OTHER; note = 2'-O-methyl-adenosine
  modified_base 4: mod_base = OTHER; note = 2'-O-methyl-cytidine
  modified_base 5: mod_base = OTHER; note = 2'-O-methyl-cytidine
  modified_base 6: mod_base = OTHER; note = 2'-fluoro-cytidine
  modified_base 7: mod_base = OTHER; note = 2'-O-methyl-cytidine
  modified_base 8: mod_base = OTHER; note = 2'-fluoro-adenosine
  modified_base 9: mod_base = OTHER; note = 2'-fluoro-guanosine
  modified_base 10: mod_base = OTHER; note = 2'-fluoro-adenosine
  modified_base 11: mod_base = OTHER; note = 2'-fluoro-adenosine
  modified_base 12: mod_base = OTHER; note = 2'-O-methyl-adenosine
  modified_base 13: mod_base = OTHER; note = 2'-O-methyl-adenosine
  modified_base 14: mod_base = OTHER; note = 2'-O-methyl-cytidine
  modified_base 15: mod_base = OTHER; note = 2'-O-methyl-uridine
  modified_base 16: mod_base = OTHER; note = 2'-O-methyl-adenosine
  modified_base 17: mod_base = OTHER; note = 2'-O-methyl-cytidine
  modified_base 18: mod_base = OTHER; note = 2'-O-methyl-cytidine with phosphorothioate linkage
  modified_base 19: mod_base = OTHER; note = 2'-O-methyl-cytidine with phosphorothioate linkage
  modified_base 20: mod_base = OTHER; note = 2'-O-methyl-adenosine
  modified_base 20: mod_base = OTHER; note = Nucleotide conjugated to 3 iterations of (2R,3R,4R,5S)-5-(3-(5-(((2R,3R,4R,5R,6R)- 3-acetamido-4,5-dihydroxy-6-(hydroxymethyl)tetrahydro-2H-py ran-2-yl)oxy) pentanamido)propyl)-2-((hydroxyl)methyl)-4-methoxytetrahydr ofuran-3-oxyl
ggaccccagaaaactaccca

SEQ ID NO: 1037 - RNA, 20 nt, synthetic construct
  source 1..20: mol_type = other RNA
  modified_base 1: mod_base = OTHER; note = 2'-O-methyl-uridine with phosphorothioate linkage
  modified_base 2: mod_base = OTHER; note = 2'-O-methyl-cytidine with phosphorothioate linkage
  modified_base 3: mod_base = OTHER; note = 2'-O-methyl-adenosine
  modified_base 4: mod_base = OTHER; note = 2'-O-methyl-uridine
  modified_base 5: mod_base = OTHER; note = 2'-O-methyl-cytidine
  modified_base 6: mod_base = OTHER; note = 2'-fluoro-cytidine
  modified_base 7: mod_base = OTHER; note = 2'-O-methyl-adenosine
  modified_base 8: mod_base = OTHER; note = 2'-fluoro-uridine
  modified_base 9: mod_base = OTHER; note = 2'-fluoro-guanosine
  modified_base 10: mod_base = OTHER; note = 2'-fluoro-adenosine
  modified_base 11: mod_base = OTHER; note = 2'-fluoro-cytidine
  modified_base 12: mod_base = OTHER; note = 2'-O-methyl-adenosine
  modified_base 13: mod_base = OTHER; note = 2'-O-methyl-cytidine
  modified_base 14: mod_base = OTHER; note = 2'-O-methyl-cytidine
  modified_base 15: mod_base = OTHER; note = 2'-O-methyl-adenosine
  modified_base 16: mod_base = OTHER; note = 2'-O-methyl-cytidine
  modified_base 17: mod_base = OTHER; note = 2'-O-methyl-adenosine
  modified_base 18: mod_base = OTHER; note = 2'-O-methyl-cytidine with phosphorothioate linkage
  modified_base 19: mod_base = OTHER; note = 2'-O-methyl-cytidine with phosphorothioate linkage
  modified_base 20: mod_base = OTHER; note = 2'-O-methyl-adenosine
  modified_base 20: mod_base = OTHER; note = Nucleotide conjugated to 3 iterations of (2R,3R,4R,5S)-5-(3-(5-(((2R,3R,4R,5R,6R)- 3-acetamido-4,5-dihydroxy-6-(hydroxymethyl)tetrahydro-2H-py ran-2-yl)oxy) pentanamido)propyl)-2-((hydroxyl)methyl)-4-methoxytetrahydr ofuran-3-oxyl
tcatccatgacaccacacca

SEQ ID NO: 1038 - RNA, 20 nt, synthetic construct
  source 1..20: mol_type = other RNA
  modified_base 1: mod_base = OTHER; note = 2'-O-methyl-adenosine with phosphorothioate linkage
  modified_base 2: mod_base = OTHER; note = 2'-O-methyl-guanosine with phosphorothioate linkage
  modified_base 3: mod_base = OTHER; note = 2'-O-methyl-guanosine
  modified_base 4: mod_base = OTHER; note = 2'-O-methyl-adenosine
  modified_base 5: mod_base = OTHER; note = 2'-O-methyl-adenosine
  modified_base 6: mod_base = OTHER; note = 2'-fluoro-adenosine
  modified_base 7: mod_base = OTHER; note = 2'-O-methyl-cytidine
  modified_base 8: mod_base = OTHER; note = 2'-fluoro-cytidine
  modified_base 9: mod_base = OTHER; note = 2'-fluoro-cytidine
  modified_base 10: mod_base = OTHER; note = 2'-fluoro-cytidine
  modified_base 11: mod_base = OTHER; note = 2'-fluoro-cytidine
  modified_base 12: mod_base = OTHER; note = 2'-O-methyl-guanosine
  modified_base 13: mod_base = OTHER; note = 2'-O-methyl-guanosine
  modified_base 14: mod_base = OTHER; note = 2'-O-methyl-guanosine
  modified_base 15: mod_base = OTHER; note = 2'-O-methyl-guanosine
  modified_base 16: mod_base = OTHER; note = 2'-O-methyl-uridine
  modified_base 17: mod_base = OTHER; note = 2'-O-methyl-adenosine
  modified_base 18: mod_base = OTHER; note = 2'-O-methyl-cytidine with phosphorothioate linkage
  modified_base 19: mod_base = OTHER; note = 2'-O-methyl-adenosine with phosphorothioate linkage
  modified_base 20: mod_base = OTHER; note = 2'-O-methyl-adenosine
  modified_base 20: mod_base = OTHER; note = Nucleotide conjugated to 3 iterations of (2R,3R,4R,5S)-5-(3-(5-(((2R,3R,4R,5R,6R)- 3-acetamido-4,5-dihydroxy-6-(hydroxymethyl)tetrahydro-2H-py ran-2-yl)oxy) pentanamido)propyl)-2-((hydroxyl)methyl)-4-methoxytetrahydr ofuran-3-oxyl
aggaaacccccggggtacaa

SEQ ID NO: 1039 - RNA, 20 nt, synthetic construct
  source 1..20: mol_type = other RNA
  modified_base 1: mod_base = OTHER; note = 2'-O-methyl-uridine with phosphorothioate linkage
  modified_base 2: mod_base = OTHER; note = 2'-O-methyl-guanosine with phosphorothioate linkage
  modified_base 3: mod_base = OTHER; note = 2'-O-methyl-cytidine
  modified_base 4: mod_base = OTHER; note = 2'-O-methyl-uridine
  modified_base 5: mod_base = OTHER; note = 2'-O-methyl-guanosine
  modified_base 6: mod_base = OTHER; note = 2'-fluoro-adenosine
  modified_base 7: mod_base = OTHER; note = 2'-O-methyl-guanosine
  modified_base 8: mod_base = OTHER; note = 2'-fluoro-adenosine
  modified_base 9: mod_base = OTHER; note = 2'-fluoro-uridine
  modified_base 10: mod_base = OTHER; note = 2'-fluoro-uridine
  modified_base 11: mod_base = OTHER; note = 2'-fluoro-cytidine
  modified_base 12: mod_base = OTHER; note = 2'-O-methyl-guanosine
  modified_base 13: mod_base = OTHER; note = 2'-O-methyl-cytidine
  modified_base 14: mod_base = OTHER; note = 2'-O-methyl-cytidine
  modified_base 15: mod_base = OTHER; note = 2'-O-methyl-cytidine
  modified_base 16: mod_base = OTHER; note = 2'-O-methyl-uridine
  modified_base 17: mod_base = OTHER; note = 2'-O-methyl-uridine
  modified_base 18: mod_base = OTHER; note = 2'-O-methyl-guanosine with phosphorothioate linkage
  modified_base 19: mod_base = OTHER; note = 2'-O-methyl-guanosine with phosphorothioate linkage
  modified_base 20: mod_base = OTHER; note = 2'-O-methyl-adenosine
  modified_base 20: mod_base = OTHER; note = Nucleotide conjugated to 3 iterations of (2R,3R,4R,5S)-5-(3-(5-(((2R,3R,4R,5R,6R)- 3-acetamido-4,5-dihydroxy-6-(hydroxymethyl)tetrahydro-2H-py ran-2-yl)oxy) pentanamido)propyl)-2-((hydroxyl)methyl)-4-methoxytetrahydr ofuran-3-oxyl
tgctgagattcgcccttgga

SEQ ID NO: 1040 - RNA, 20 nt, synthetic construct
  source 1..20: mol_type = other RNA
  modified_base 1: mod_base = OTHER; note = 2'-O-methyl-guanosine with phosphorothioate linkage
  modified_base 2: mod_base = OTHER; note = 2'-O-methyl-guanosine with phosphorothioate linkage
  modified_base 3: mod_base = OTHER; note = 2'-O-methyl-uridine
  modified_base 4: mod_base = OTHER; note = 2'-O-methyl-cytidine
  modified_base 5: mod_base = OTHER; note = 2'-O-methyl-adenosine
  modified_base 6: mod_base = OTHER; note = 2'-fluoro-uridine
  modified_base 7: mod_base = OTHER; note = 2'-O-methyl-cytidine
  modified_base 8: mod_base = OTHER; note = 2'-fluoro-uridine
  modified_base 9: mod_base = OTHER; note = 2'-fluoro-adenosine
  modified_base 10: mod_base = OTHER; note = 2'-fluoro-uridine
  modified_base 11: mod_base = OTHER; note = 2'-fluoro-guanosine
  modified_base 12: mod_base = OTHER; note = 2'-O-methyl-adenosine
  modified_base 13: mod_base = OTHER; note = 2'-O-methyl-cytidine
  modified_base 14: mod_base = OTHER; note = 2'-O-methyl-adenosine
  modified_base 15: mod_base = OTHER; note = 2'-O-methyl-cytidine
  modified_base 16: mod_base = OTHER; note = 2'-O-methyl-cytidine
  modified_base 17: mod_base = OTHER; note = 2'-O-methyl-adenosine
  modified_base 18: mod_base = OTHER; note = 2'-O-methyl-cytidine with phosphorothioate linkage
  modified_base 19: mod_base = OTHER; note = 2'-O-methyl-adenosine with phosphorothioate linkage
  modified_base 20: mod_base = OTHER; note = 2'-O-methyl-adenosine
  modified_base 20: mod_base = OTHER; note = Nucleotide conjugated to 3 iterations of (2R,3R,4R,5S)-5-(3-(5-(((2R,3R,4R,5R,6R)- 3-acetamido-4,5-dihydroxy-6-(hydroxymethyl)tetrahydro-2H-py ran-2-yl)oxy) pentanamido)propyl)-2-((hydroxyl)methyl)-4-methoxytetrahydr ofuran-3-oxyl
ggtcatctatgacaccacaa

SEQ ID NO: 1041 - RNA, 20 nt, synthetic construct
  source 1..20: mol_type = other RNA
  modified_base 1: mod_base = OTHER; note = 2'-O-methyl-guanosine with phosphorothioate linkage
  modified_base 2: mod_base = OTHER; note = 2'-O-methyl-uridine with phosphorothioate linkage
  modified_base 3: mod_base = OTHER; note = 2'-O-methyl-uridine
  modified_base 4: mod_base = OTHER; note = 2'-O-methyl-adenosine
  modified_base 5: mod_base = OTHER; note = 2'-O-methyl-uridine
  modified_base 6: mod_base = OTHER; note = 2'-fluoro-adenosine
  modified_base 7: mod_base = OTHER; note = 2'-O-methyl-cytidine
  modified_base 8: mod_base = OTHER; note = 2'-fluoro-cytidine
  modified_base 9: mod_base = OTHER; note = 2'-fluoro-adenosine
  modified_base 10: mod_base = OTHER; note = 2'-fluoro-uridine
  modified_base 11: mod_base = OTHER; note = 2'-fluoro-guanosine
  modified_base 12: mod_base = OTHER; note = 2'-O-methyl-guanosine
  modified_base 13: mod_base = OTHER; note = 2'-O-methyl-adenosine
  modified_base 14: mod_base = OTHER; note = 2'-O-methyl-uridine
  modified_base 15: mod_base = OTHER; note = 2'-O-methyl-cytidine
  modified_base 16: mod_base = OTHER; note = 2'-O-methyl-cytidine
  modified_base 17: mod_base = OTHER; note = 2'-O-methyl-cytidine
  modified_base 18: mod_base = OTHER; note = 2'-O-methyl-adenosine with phosphorothioate linkage
  modified_base 19: mod_base = OTHER; note = 2'-O-methyl-adenosine with phosphorothioate linkage
  modified_base 20: mod_base = OTHER; note = 2'-O-methyl-adenosine
  modified_base 20: mod_base = OTHER; note = Nucleotide conjugated to 3 iterations of (2R,3R,4R,5S)-5-(3-(5-(((2R,3R,4R,5R,6R)- 3-acetamido-4,5-dihydroxy-6-(hydroxymethyl)tetrahydro-2H-py ran-2-yl)oxy) pentanamido)propyl)-2-((hydroxyl)methyl)-4-methoxytetrahydr ofuran-3-oxyl
gttataccatggatcccaaa

SEQ ID NO: 1042 - RNA, 20 nt, synthetic construct
  source 1..20: mol_type = other RNA
  modified_base 1: mod_base = OTHER; note = 2'-O-methyl-adenosine with phosphorothioate linkage
  modified_base 2: mod_base = OTHER; note = 2'-O-methyl-cytidine with phosphorothioate linkage
  modified_base 3: mod_base = OTHER; note = 2'-O-methyl-cytidine
  modified_base 4: mod_base = OTHER; note = 2'-O-methyl-guanosine
  modified_base 5: mod_base = OTHER; note = 2'-O-methyl-adenosine
  modified_base 6: mod_base = OTHER; note = 2'-fluoro-cytidine
  modified_base 7: mod_base = OTHER; note = 2'-O-methyl-uridine
  modified_base 8: mod_base = OTHER; note = 2'-fluoro-guanosine
  modified_base 9: mod_base = OTHER; note = 2'-fluoro-adenosine
  modified_base 10: mod_base = OTHER; note = 2'-fluoro-guanosine
  modified_base 11: mod_base = OTHER; note = 2'-fluoro-cytidine
  modified_base 12: mod_base = OTHER; note = 2'-O-methyl-adenosine
  modified_base 13: mod_base = OTHER; note = 2'-O-methyl-adenosine
  modified_base 14: mod_base = OTHER; note = 2'-O-methyl-adenosine
  modified_base 15: mod_base = OTHER; note = 2'-O-methyl-guanosine
  modified_base 16: mod_base = OTHER; note = 2'-O-methyl-guanosine
  modified_base 17: mod_base = OTHER; note = 2'-O-methyl-cytidine
  modified_base 18: mod_base = OTHER; note = 2'-O-methyl-cytidine with phosphorothioate linkage
  modified_base 19: mod_base = OTHER; note = 2'-O-methyl-uridine with phosphorothioate linkage
  modified_base 20: mod_base = OTHER; note = 2'-O-methyl-adenosine
  modified_base 20: mod_base = OTHER; note = Nucleotide conjugated to 3 iterations of (2R,3R,4R,5S)-5-(3-(5-(((2R,3R,4R,5R,6R)- 3-acetamido-4,5-dihydroxy-6-(hydroxymethyl)tetrahydro-2H-py ran-2-yl)oxy) pentanamido)propyl)-2-((hydroxyl)methyl)-4-methoxytetrahydr ofuran-3-oxyl
accgactgagcaaaggccta

SEQ ID NO: 1043 - RNA, 20 nt, synthetic construct
  source 1..20: mol_type = other RNA
  modified_base 1: mod_base = OTHER; note = 2'-O-methyl-adenosine with phosphorothioate linkage
  modified_base 2: mod_base = OTHER; note = 2'-O-methyl-cytidine with phosphorothioate linkage
  modified_base 3: mod_base = OTHER; note = 2'-O-methyl-uridine
  modified_base 4: mod_base = OTHER; note = 2'-O-methyl-guanosine
  modified_base 5: mod_base = OTHER; note = 2'-O-methyl-cytidine
  modified_base 6: mod_base = OTHER; note = 2'-fluoro-adenosine
  modified_base 7: mod_base = OTHER; note = 2'-O-methyl-guanosine
  modified_base 8: mod_base = OTHER; note = 2'-fluoro-guanosine
  modified_base 9: mod_base = OTHER; note = 2'-fluoro-adenosine
  modified_base 10: mod_base = OTHER; note = 2'-fluoro-adenosine
  modified_base 11: mod_base = OTHER; note = 2'-fluoro-uridine
  modified_base 12: mod_base = OTHER; note = 2'-O-methyl-cytidine
  modified_base 13: mod_base = OTHER; note = 2'-O-methyl-cytidine
  modified_base 14: mod_base = OTHER; note = 2'-O-methyl-adenosine
  modified_base 15: mod_base = OTHER; note = 2'-O-methyl-guanosine
  modified_base 16: mod_base = OTHER; note = 2'-O-methyl-adenosine
  modified_base 17: mod_base = OTHER; note = 2'-O-methyl-uridine
  modified_base 18: mod_base = OTHER; note = 2'-O-methyl-cytidine with phosphorothioate linkage
  modified_base 19: mod_base = OTHER; note = 2'-O-methyl-cytidine with phosphorothioate linkage
  modified_base 20: mod_base = OTHER; note = 2'-O-methyl-adenosine
  modified_base 20: mod_base = OTHER; note = Nucleotide conjugated to 3 iterations of (2R,3R,4R,5S)-5-(3-(5-(((2R,3R,4R,5R,6R)- 3-acetamido-4,5-dihydroxy-6-(hydroxymethyl)tetrahydro-2H-py ran-2-yl)oxy) pentanamido)propyl)-2-((hydroxyl)methyl)-4-methoxytetrahydr ofuran-3-oxyl
actgcaggaatccagatcca

SEQ ID NO: 1044 - RNA, 20 nt, synthetic construct
  source 1..20: mol_type = other RNA
  modified_base 1: mod_base = OTHER; note = 2'-O-methyl-guanosine with phosphorothioate linkage
  modified_base 2: mod_base = OTHER; note = 2'-O-methyl-uridine with phosphorothioate linkage
  modified_base 3: mod_base = OTHER; note = 2'-O-methyl-uridine
  modified_base 4: mod_base = OTHER; note = 2'-O-methyl-adenosine
  modified_base 5: mod_base = OTHER; note = 2'-O-methyl-cytidine
  modified_base 6: mod_base = OTHER; note = 2'-fluoro-adenosine
  modified_base 7: mod_base = OTHER; note = 2'-O-methyl-cytidine
  modified_base 8: mod_base = OTHER; note = 2'-fluoro-cytidine
  modified_base 9: mod_base = OTHER; note = 2'-fluoro-adenosine
  modified_base 10: mod_base = OTHER; note = 2'-fluoro-uridine
  modified_base 11: mod_base = OTHER; note = 2'-fluoro-guanosine
  modified_base 12: mod_base = OTHER; note = 2'-O-methyl-guanosine
  modified_base 13: mod_base = OTHER; note = 2'-O-methyl-adenosine
  modified_base 14: mod_base = OTHER; note = 2'-O-methyl-uridine
  modified_base 15: mod_base = OTHER; note = 2'-O-methyl-cytidine
  modified_base 16: mod_base = OTHER; note = 2'-O-methyl-cytidine
  modified_base 17: mod_base = OTHER; note = 2'-O-methyl-cytidine
  modified_base 18: mod_base = OTHER; note = 2'-O-methyl-adenosine with phosphorothioate linkage
  modified_base 19: mod_base = OTHER; note = 2'-O-methyl-guanosine with phosphorothioate linkage
  modified_base 20: mod_base = OTHER; note = 2'-O-methyl-adenosine
  modified_base 20: mod_base = OTHER; note = Nucleotide conjugated to 3 iterations of (2R,3R,4R,5S)-5-(3-(5-(((2R,3R,4R,5R,6R)- 3-acetamido-4,5-dihydroxy-6-(hydroxymethyl)tetrahydro-2H-py ran-2-yl)oxy) pentanamido)propyl)-2-((hydroxyl)methyl)-4-methoxytetrahydr ofuran-3-oxyl
gttacaccatggatcccaga

SEQ ID NO: 1045 - RNA, 20 nt, synthetic construct
  source 1..20: mol_type = other RNA
  modified_base 1: mod_base = OTHER; note = 2'-O-methyl-cytidine with phosphorothioate linkage
  modified_base 2: mod_base = OTHER; note = 2'-O-methyl-cytidine with phosphorothioate linkage
  modified_base 3: mod_base = OTHER; note = 2'-O-methyl-uridine
  modified_base 4: mod_base = OTHER; note = 2'-O-methyl-uridine
  modified_base 5: mod_base = OTHER; note = 2'-O-methyl-cytidine
  modified_base 6: mod_base = OTHER; note = 2'-fluoro-uridine
  modified_base 7: mod_base = OTHER; note = 2'-O-methyl-guanosine
  modified_base 8: mod_base = OTHER; note = 2'-fluoro-adenosine
  modified_base 9: mod_base = OTHER; note = 2'-fluoro-adenosine
  modified_base 10: mod_base = OTHER; note = 2'-fluoro-guanosine
  modified_base 11: mod_base = OTHER; note = 2'-fluoro-adenosine
  modified_base 12: mod_base = OTHER; note = 2'-O-methyl-adenosine
  modified_base 13: mod_base = OTHER; note = 2'-O-methyl-guanosine
  modified_base 14: mod_base = OTHER; note = 2'-O-methyl-cytidine
  modified_base 15: mod_base = OTHER; note = 2'-O-methyl-adenosine
  modified_base 16: mod_base = OTHER; note = 2'-O-methyl-cytidine
  modified_base 17: mod_base = OTHER; note = 2'-O-methyl-cytidine
  modified_base 18: mod_base = OTHER; note = 2'-O-methyl-adenosine with phosphorothioate linkage
  modified_base 19: mod_base = OTHER; note = 2'-O-methyl-adenosine with phosphorothioate linkage
  modified_base 20: mod_base = OTHER; note = 2'-O-methyl-adenosine
  modified_base 20: mod_base = OTHER; note = Nucleotide conjugated to 3 iterations of (2R,3R,4R,5S)-5-(3-(5-(((2R,3R,4R,5R,6R)- 3-acetamido-4,5-dihydroxy-6-(hydroxymethyl)tetrahydro-2H-py ran-2-yl)oxy) pentanamido)propyl)-2-((hydroxyl)methyl)-4-methoxytetrahydr ofuran-3-oxyl
ccttctgaagaagcaccaaa

SEQ ID NO: 1046 - RNA, 20 nt, synthetic construct
  source 1..20: mol_type = other RNA
  modified_base 1: mod_base = OTHER; note = 2'-O-methyl-cytidine with phosphorothioate linkage
  modified_base 2: mod_base = OTHER; note = 2'-O-methyl-uridine with phosphorothioate linkage
  modified_base 3: mod_base = OTHER; note = 2'-O-methyl-adenosine
  modified_base 4: mod_base = OTHER; note = 2'-O-methyl-cytidine
  modified_base 5: mod_base = OTHER; note = 2'-O-methyl-uridine
  modified_base 6: mod_base = OTHER; note = 2'-fluoro-adenosine
  modified_base 7: mod_base = OTHER; note = 2'-O-methyl-cytidine
  modified_base 8: mod_base = OTHER; note = 2'-fluoro-cytidine
  modified_base 9: mod_base = OTHER; note = 2'-fluoro-adenosine
  modified_base 10: mod_base = OTHER; note = 2'-fluoro-uridine
  modified_base 11: mod_base = OTHER; note = 2'-fluoro-uridine
  modified_base 12: mod_base = OTHER; note = 2'-O-methyl-adenosine
  modified_base 13: mod_base = OTHER; note = 2'-O-methyl-uridine
  modified_base 14: mod_base = OTHER; note = 2'-O-methyl-guanosine
  modified_base 15: mod_base = OTHER; note = 2'-O-methyl-guanosine
  modified_base 16: mod_base = OTHER; note = 2'-O-methyl-adenosine
  modified_base 17: mod_base = OTHER; note = 2'-O-methyl-cytidine
  modified_base 18: mod_base = OTHER; note = 2'-O-methyl-adenosine with phosphorothioate linkage
  modified_base 19: mod_base = OTHER; note = 2'-O-methyl-guanosine with phosphorothioate linkage
  modified_base 20: mod_base = OTHER; note = 2'-O-methyl-adenosine
  modified_base 20: mod_base = OTHER; note = Nucleotide conjugated to 3 iterations of (2R,3R,4R,5S)-5-(3-(5-(((2R,3R,4R,5R,6R)- 3-acetamido-4,5-dihydroxy-6-(hydroxymethyl)tetrahydro-2H-py ran-2-yl)oxy) pentanamido)propyl)-2-((hydroxyl)methyl)-4-methoxytetrahydr ofuran-3-oxyl
ctactaccattatggacaga

SEQ ID NO: 1047 - RNA, 20 nt, synthetic construct
  source 1..20: mol_type = other RNA
  modified_base 1: mod_base = OTHER; note = 2'-O-methyl-cytidine with phosphorothioate linkage
  modified_base 2: mod_base = OTHER; note = 2'-O-methyl-cytidine with phosphorothioate linkage
  modified_base 3: mod_base = OTHER; note = 2'-O-methyl-adenosine
  modified_base 4: mod_base = OTHER; note = 2'-O-methyl-adenosine
  modified_base 5: mod_base = OTHER; note = 2'-O-methyl-guanosine
  modified_base 6: mod_base = OTHER; note = 2'-fluoro-cytidine
  modified_base 7: mod_base = OTHER; note = 2'-O-methyl-uridine
  modified_base 8: mod_base = OTHER; note = 2'-fluoro-uridine
  modified_base 9: mod_base = OTHER; note = 2'-fluoro-guanosine
  modified_base 10: mod_base = OTHER; note = 2'-fluoro-guanosine
  modified_base 11: mod_base = OTHER; note = 2'-fluoro-uridine
  modified_base 12: mod_base = OTHER; note = 2'-O-methyl-cytidine
  modified_base 13: mod_base = OTHER; note = 2'-O-methyl-adenosine
  modified_base 14: mod_base = OTHER; note = 2'-O-methyl-uridine
  modified_base 15: mod_base = OTHER; note = 2'-O-methyl-cytidine
  modified_base 16: mod_base = OTHER; note = 2'-O-methyl-uridine
  modified_base 17: mod_base = OTHER; note = 2'-O-methyl-adenosine
  modified_base 18: mod_base = OTHER; note = 2'-O-methyl-uridine with phosphorothioate linkage
  modified_base 19: mod_base = OTHER; note = 2'-O-methyl-guanosine with phosphorothioate linkage
  modified_base 20: mod_base = OTHER; note = 2'-O-methyl-adenosine
  modified_base 20: mod_base = OTHER; note = Nucleotide conjugated to 3 iterations of (2R,3R,4R,5S)-5-(3-(5-(((2R,3R,4R,5R,6R)- 3-acetamido-4,5-dihydroxy-6-(hydroxymethyl)tetrahydro-2H-py ran-2-yl)oxy) pentanamido)propyl)-2-((hydroxyl)methyl)-4-methoxytetrahydr ofuran-3-oxyl
ccaagcttggtcatctatga

SEQ ID NO: 1048 - RNA, 20 nt, synthetic construct
  source 1..20: mol_type = other RNA
  modified_base 1: mod_base = OTHER; note = 2'-O-methyl-guanosine with phosphorothioate linkage
  modified_base 2: mod_base = OTHER; note = 2'-O-methyl-uridine with phosphorothioate linkage
  modified_base 3: mod_base = OTHER; note = 2'-O-methyl-guanosine
  modified_base 4: mod_base = OTHER; note = 2'-O-methyl-uridine
  modified_base 5: mod_base = OTHER; note = 2'-O-methyl-uridine
  modified_base 6: mod_base = OTHER; note = 2'-fluoro-uridine
  modified_base 7: mod_base = OTHER; note = 2'-O-methyl-uridine
  modified_base 8: mod_base = OTHER; note = 2'-fluoro-adenosine
  modified_base 9: mod_base = OTHER; note = 2'-fluoro-cytidine
  modified_base 10: mod_base = OTHER; note = 2'-fluoro-cytidine
  modified_base 11: mod_base = OTHER; note = 2'-fluoro-adenosine
  modified_base 12: mod_base = OTHER; note = 2'-O-methyl-uridine
  modified_base 13: mod_base = OTHER; note = 2'-O-methyl-guanosine
  modified_base 14: mod_base = OTHER; note = 2'-O-methyl-guanosine
  modified_base 15: mod_base = OTHER; note = 2'-O-methyl-adenosine
  modified_base 16: mod_base = OTHER; note = 2'-O-methyl-cytidine
  modified_base 17: mod_base = OTHER; note = 2'-O-methyl-cytidine
  modified_base 18: mod_base = OTHER; note = 2'-O-methyl-cytidine with phosphorothioate linkage
  modified_base 19: mod_base = OTHER; note = 2'-O-methyl-cytidine with phosphorothioate linkage
  modified_base 20: mod_base = OTHER; note = 2'-O-methyl-adenosine
  modified_base 20: mod_base = OTHER; note = Nucleotide conjugated to 3 iterations of (2R,3R,4R,5S)-5-(3-(5-(((2R,3R,4R,5R,6R)- 3-acetamido-4,5-dihydroxy-6-(hydroxymethyl)tetrahydro-2H-py ran-2-yl)oxy) pentanamido)propyl)-2-((hydroxyl)methyl)-4-methoxytetrahydr ofuran-3-oxyl
gtgttttaccatggacccca

SEQ ID NO: 1049 - RNA, 20 nt, synthetic construct
  source 1..20: mol_type = other RNA
  modified_base 1: mod_base = OTHER; note = 2'-O-methyl-adenosine with phosphorothioate linkage
  modified_base 2: mod_base = OTHER; note = 2'-O-methyl-adenosine with phosphorothioate linkage
  modified_base 3: mod_base = OTHER; note = 2'-O-methyl-guanosine
  modified_base 4: mod_base = OTHER; note = 2'-O-methyl-guanosine
  modified_base 5: mod_base = OTHER; note = 2'-O-methyl-cytidine
  modified_base 6: mod_base = OTHER; note = 2'-fluoro-cytidine
  modified_base 7: mod_base = OTHER; note = 2'-O-methyl-uridine
  modified_base 8: mod_base = OTHER; note = 2'-fluoro-guanosine
  modified_base 9: mod_base = OTHER; note = 2'-fluoro-guanosine
  modified_base 10: mod_base = OTHER; note = 2'-fluoro-guanosine
  modified_base 11: mod_base = OTHER; note = 2'-fluoro-guanosine
  modified_base 12: mod_base = OTHER; note = 2'-O-methyl-uridine
  modified_base 13: mod_base = OTHER; note = 2'-O-methyl-guanosine
  modified_base 14: mod_base = OTHER; note = 2'-O-methyl-cytidine
  modified_base 15: mod_base = OTHER; note = 2'-O-methyl-adenosine
  modified_base 16: mod_base = OTHER; note = 2'-O-methyl-guanosine
  modified_base 17: mod_base = OTHER; note = 2'-O-methyl-guanosine
  modified_base 18: mod_base = OTHER; note = 2'-O-methyl-adenosine with phosphorothioate linkage
  modified_base 19: mod_base = OTHER; note = 2'-O-methyl-guanosine with phosphorothioate linkage
  modified_base 20: mod_base = OTHER; note = 2'-O-methyl-adenosine
  modified_base 20: mod_base = OTHER; note = Nucleotide conjugated to 3 iterations of (2R,3R,4R,5S)-5-(3-(5-(((2R,3R,4R,5R,6R)- 3-acetamido-4,5-dihydroxy-6-(hydroxymethyl)tetrahydro-2H-py ran-2-yl)oxy) pentanamido)propyl)-2-((hydroxyl)methyl)-4-methoxytetrahydr ofuran-3-oxyl
aaggcctggggtgcaggaga

SEQ ID NO: 1050 - RNA, 20 nt, synthetic construct
  source 1..20: mol_type = other RNA
  modified_base 1: mod_base = OTHER; note = 2'-O-methyl-guanosine with phosphorothioate linkage
  modified_base 2: mod_base = OTHER; note = 2'-O-methyl-guanosine with phosphorothioate linkage
  modified_base 3: mod_base = OTHER; note = 2'-O-methyl-uridine
  modified_base 4: mod_base = OTHER; note = 2'-O-methyl-guanosine
  modified_base 5: mod_base = OTHER; note = 2'-O-methyl-guanosine
  modified_base 6: mod_base = OTHER; note = 2'-fluoro-uridine
  modified_base 7: mod_base = OTHER; note = 2'-O-methyl-cytidine
  modified_base 8: mod_base = OTHER; note = 2'-fluoro-cytidine
  modified_base 9: mod_base = OTHER; note = 2'-fluoro-cytidine
  modified_base 10: mod_base = OTHER; note = 2'-fluoro-adenosine
  modified_base 11: mod_base = OTHER; note = 2'-fluoro-guanosine
  modified_base 12: mod_base = OTHER; note = 2'-O-methyl-uridine
  modified_base 13: mod_base = OTHER; note = 2'-O-methyl-uridine
  modified_base 14: mod_base = OTHER; note = 2'-O-methyl-cytidine
  modified_base 15: mod_base = OTHER; note = 2'-O-methyl-cytidine
  modified_base 16: mod_base = OTHER; note = 2'-O-methyl-adenosine
  modified_base 17: mod_base = OTHER; note = 2'-O-methyl-adenosine
  modified_base 18: mod_base = OTHER; note = 2'-O-methyl-guanosine with phosphorothioate linkage
  modified_base 19: mod_base = OTHER; note = 2'-O-methyl-cytidine with phosphorothioate linkage
  modified_base 20: mod_base = OTHER; note = 2'-O-methyl-adenosine
  modified_base 20: mod_base = OTHER; note = Nucleotide conjugated to 3 iterations of (2R,3R,4R,5S)-5-(3-(5-(((2R,3R,4R,5R,6R)- 3-acetamido-4,5-dihydroxy-6-(hydroxymethyl)tetrahydro-2H-py ran-2-yl)oxy) pentanamido)propyl)-2-((hydroxyl)methyl)-4-methoxytetrahydr ofuran-3-oxyl
ggtggtcccagttccaagca

SEQ ID NO: 1051 - RNA, 20 nt, synthetic construct
  source 1..20: mol_type = other RNA
  modified_base 1: mod_base = OTHER; note = 2'-O-methyl-cytidine with phosphorothioate linkage
  modified_base 2: mod_base = OTHER; note = 2'-O-methyl-cytidine with phosphorothioate linkage
  modified_base 3: mod_base = OTHER; note = 2'-O-methyl-uridine
  modified_base 4: mod_base = OTHER; note = 2'-O-methyl-guanosine
  modified_base 5: mod_base = OTHER; note = 2'-O-methyl-guanosine
  modified_base 6: mod_base = OTHER; note = 2'-fluoro-guanosine
  modified_base 7: mod_base = OTHER; note = 2'-O-methyl-guanosine
  modified_base 8: mod_base = OTHER; note = 2'-fluoro-uridine
  modified_base 9: mod_base = OTHER; note = 2'-fluoro-guanosine
  modified_base 10: mod_base = OTHER; note = 2'-fluoro-cytidine
  modified_base 11: mod_base = OTHER; note = 2'-fluoro-adenosine
  modified_base 12: mod_base = OTHER; note = 2'-O-methyl-guanosine
  modified_base 13: mod_base = OTHER; note = 2'-O-methyl-guanosine
  modified_base 14: mod_base = OTHER; note = 2'-O-methyl-adenosine
  modified_base 15: mod_base = OTHER; note = 2'-O-methyl-guanosine
  modified_base 16: mod_base = OTHER; note = 2'-O-methyl-uridine
  modified_base 17: mod_base = OTHER; note = 2'-O-methyl-guanosine
  modified_base 18: mod_base = OTHER; note = 2'-O-methyl-cytidine with phosphorothioate linkage
  modified_base 19: mod_base = OTHER; note = 2'-O-methyl-uridine with phosphorothioate linkage
  modified_base 20: mod_base = OTHER; note = 2'-O-methyl-adenosine
  modified_base 20: mod_base = OTHER; note = Nucleotide conjugated to 3 iterations of (2R,3R,4R,5S)-5-(3-(5-(((2R,3R,4R,5R,6R)- 3-acetamido-4,5-dihydroxy-6-(hydroxymethyl)tetrahydro-2H-py ran-2-yl)oxy) pentanamido)propyl)-2-((hydroxyl)methyl)-4-methoxytetrahydr ofuran-3-oxyl
cctggggtgcaggagtgcta

SEQ ID NO: 1052 - RNA, 20 nt, synthetic construct
  source 1..20: mol_type = other RNA
  modified_base 1: mod_base = OTHER; note = 2'-O-methyl-cytidine with phosphorothioate linkage
  modified_base 2: mod_base = OTHER; note = 2'-O-methyl-adenosine with phosphorothioate linkage
  modified_base 3: mod_base = OTHER; note = 2'-O-methyl-guanosine
  modified_base 4: mod_base = OTHER; note = 2'-O-methyl-adenosine
  modified_base 5: mod_base = OTHER; note = 2'-O-methyl-guanosine
  modified_base 6: mod_base = OTHER; note = 2'-fluoro-guanosine
  modified_base 7: mod_base = OTHER; note = 2'-O-methyl-adenosine
  modified_base 8: mod_base = OTHER; note = 2'-fluoro-cytidine
  modified_base 9: mod_base = OTHER; note = 2'-fluoro-cytidine
  modified_base 10: mod_base = OTHER; note = 2'-fluoro-cytidine
  modified_base 11: mod_base = OTHER; note = 2'-fluoro-cytidine
  modified_base 12: mod_base = OTHER; note = 2'-O-methyl-adenosine
  modified_base 13: mod_base = OTHER; note = 2'-O-methyl-guanosine
  modified_base 14: mod_base = OTHER; note = 2'-O-methyl-adenosine
  modified_base 15: mod_base = OTHER; note = 2'-O-methyl-adenosine
  modified_base 16: mod_base = OTHER; note = 2'-O-methyl-adenosine
  modified_base 17: mod_base = OTHER; note = 2'-O-methyl-adenosine
  modified_base 18: mod_base = OTHER; note = 2'-O-methyl-cytidine with phosphorothioate linkage
  modified_base 19: mod_base = OTHER; note = 2'-O-methyl-uridine with phosphorothioate linkage
  modified_base 20: mod_base = OTHER; note = 2'-O-methyl-adenosine
  modified_base 20: mod_base = OTHER; note = Nucleotide conjugated to 3 iterations of (2R,3R,4R,5S)-5-(3-(5-(((2R,3R,4R,5R,6R)- 3-acetamido-4,5-dihydroxy-6-(hydroxymethyl)tetrahydro-2H-py ran-2-yl)oxy) pentanamido)propyl)-2-((hydroxyl)methyl)-4-methoxytetrahydr ofuran-3-oxyl
cagaggaccccagaaaacta

SEQ ID NO: 1053 - RNA, 20 nt, synthetic construct
  source 1..20: mol_type = other RNA
  modified_base 1: mod_base = OTHER; note = 2'-O-methyl-uridine with phosphorothioate linkage
  modified_base 2: mod_base = OTHER; note = 2'-O-methyl-guanosine with phosphorothioate linkage
  modified_base 3: mod_base = OTHER; note = 2'-O-methyl-cytidine
  modified_base 4: mod_base = OTHER; note = 2'-O-methyl-uridine
  modified_base 5: mod_base = OTHER; note = 2'-O-methyl-cytidine
  modified_base 6: mod_base = OTHER; note = 2'-fluoro-adenosine
  modified_base 7: mod_base = OTHER; note = 2'-O-methyl-guanosine
  modified_base 8: mod_base = OTHER; note = 2'-fluoro-adenosine
  modified_base 9: mod_base = OTHER; note = 2'-fluoro-cytidine
  modified_base 10: mod_base = OTHER; note = 2'-fluoro-adenosine
  modified_base 11: mod_base = OTHER; note = 2'-fluoro-cytidine
  modified_base 12: mod_base = OTHER; note = 2'-O-methyl-adenosine
  modified_base 13: mod_base = OTHER; note = 2'-O-methyl-guanosine
  modified_base 14: mod_base = OTHER; note = 2'-O-methyl-adenosine
  modified_base 15: mod_base = OTHER; note = 2'-O-methyl-adenosine
  modified_base 16: mod_base = OTHER; note = 2'-O-methyl-guanosine
  modified_base 17: mod_base = OTHER; note = 2'-O-methyl-guanosine
  modified_base 18: mod_base = OTHER; note = 2'-O-methyl-guanosine with phosphorothioate linkage
  modified_base 19: mod_base = OTHER; note = 2'-O-methyl-adenosine with phosphorothioate linkage
  modified_base 20: mod_base = OTHER; note = 2'-O-methyl-adenosine
  modified_base 20: mod_base = OTHER; note = Nucleotide conjugated to 3 iterations of (2R,3R,4R,5S)-5-(3-(5-(((2R,3R,4R,5R,6R)- 3-acetamido-4,5-dihydroxy-6-(hydroxymethyl)tetrahydro-2H-py ran-2-yl)oxy) pentanamido)propyl)-2-((hydroxyl)methyl)-4-methoxytetrahydr ofuran-3-oxyl
tgctcagacacagaagggaa

SEQ ID NO: 1054 - RNA, 20 nt, synthetic construct
  source 1..20: mol_type = other RNA
  modified_base 1: mod_base = OTHER; note = 2'-O-methyl-cytidine with phosphorothioate linkage
  modified_base 2: mod_base = OTHER; note = 2'-O-methyl-cytidine with phosphorothioate linkage
  modified_base 3: mod_base = OTHER; note = 2'-O-methyl-cytidine
  modified_base 4: mod_base = OTHER; note = 2'-O-methyl-uridine
  modified_base 5: mod_base = OTHER; note = 2'-O-methyl-uridine
  modified_base 6: mod_base = OTHER; note = 2'-fluoro-guanosine
  modified_base 7: mod_base = OTHER; note = 2'-O-methyl-guanosine
  modified_base 8: mod_base = OTHER; note = 2'-fluoro-uridine
  modified_base 9: mod_base = OTHER; note = 2'-fluoro-guanosine
  modified_base 10: mod_base = OTHER; note = 2'-fluoro-uridine
  modified_base 11: mod_base = OTHER; note = 2'-fluoro-uridine
  modified_base 12: mod_base = OTHER; note = 2'-O-methyl-adenosine
  modified_base 13: mod_base = OTHER; note = 2'-O-methyl-cytidine
  modified_base 14: mod_base = OTHER; note = 2'-O-methyl-adenosine
  modified_base 15: mod_base = OTHER; note = 2'-O-methyl-cytidine
  modified_base 16: mod_base = OTHER; note = 2'-O-methyl-cytidine
  modified_base 17: mod_base = OTHER; note = 2'-O-methyl-adenosine
  modified_base 18: mod_base = OTHER; note = 2'-O-methyl-uridine with phosphorothioate linkage
  modified_base 19: mod_base = OTHER; note = 2'-O-methyl-guanosine with phosphorothioate linkage
  modified_base 20: mod_base = OTHER; note = 2'-O-methyl-adenosine
  modified_base 20: mod_base = OTHER; note = Nucleotide conjugated to 3 iterations of (2R,3R,4R,5S)-5-(3-(5-(((2R,3R,4R,5R,6R)- 3-acetamido-4,5-dihydroxy-6-(hydroxymethyl)tetrahydro-2H-py ran-2-yl)oxy) pentanamido)propyl)-2-((hydroxyl)methyl)-4-methoxytetrahydr ofuran-3-oxyl
cccttggtgttacaccatga

SEQ ID NO: 1055 - RNA, 20 nt, synthetic construct
  source 1..20: mol_type = other RNA
  modified_base 1: mod_base = OTHER; note = 2'-O-methyl-uridine with phosphorothioate linkage
  modified_base 2: mod_base = OTHER; note = 2'-O-methyl-uridine with phosphorothioate linkage
  modified_base 3: mod_base = OTHER; note = 2'-O-methyl-cytidine
  modified_base 4: mod_base = OTHER; note = 2'-O-methyl-guanosine
  modified_base 5: mod_base = OTHER; note = 2'-O-methyl-cytidine
  modified_base 6: mod_base = OTHER; note = 2'-fluoro-cytidine
  modified_base 7: mod_base = OTHER; note = 2'-O-methyl-cytidine
  modified_base 8: mod_base = OTHER; note = 2'-fluoro-uridine
  modified_base 9: mod_base = OTHER; note = 2'-fluoro-uridine
  modified_base 10: mod_base = OTHER; note = 2'-fluoro-guanosine
  modified_base 11: mod_base = OTHER; note = 2'-fluoro-guanosine
  modified_base 12: mod_base = OTHER; note = 2'-O-methyl-uridine
  modified_base 13: mod_base = OTHER; note = 2'-O-methyl-guanosine
  modified_base 14: mod_base = OTHER; note = 2'-O-methyl-uridine
  modified_base 15: mod_base = OTHER; note = 2'-O-methyl-uridine
  modified_base 16: mod_base = OTHER; note = 2'-O-methyl-adenosine
  modified_base 17: mod_base = OTHER; note = 2'-O-methyl-cytidine
  modified_base 18: mod_base = OTHER; note = 2'-O-methyl-adenosine with phosphorothioate linkage
  modified_base 19: mod_base = OTHER; note = 2'-O-methyl-cytidine with phosphorothioate linkage
  modified_base 20: mod_base = OTHER; note = 2'-O-methyl-adenosine
  modified_base 20: mod_base = OTHER; note = Nucleotide conjugated to 3 iterations of (2R,3R,4R,5S)-5-(3-(5-(((2R,3R,4R,5R,6R)- 3-acetamido-4,5-dihydroxy-6-(hydroxymethyl)tetrahydro-2H-py ran-2-yl)oxy) pentanamido)propyl)-2-((hydroxyl)methyl)-4-methoxytetrahydr ofuran-3-oxyl
ttcgcccttggtgttacaca

SEQ ID NO: 1056 - RNA, 20 nt, synthetic construct
  source 1..20: mol_type = other RNA
  modified_base 1: mod_base = OTHER; note = 2'-O-methyl-guanosine with phosphorothioate linkage
  modified_base 2: mod_base = OTHER; note = 2'-O-methyl-adenosine with phosphorothioate linkage
  modified_base 3: mod_base = OTHER; note = 2'-O-methyl-guanosine
  modified_base 4: mod_base = OTHER; note = 2'-O-methyl-cytidine
  modified_base 5: mod_base = OTHER; note = 2'-O-methyl-adenosine
  modified_base 6: mod_base = OTHER; note = 2'-fluoro-adenosine
  modified_base 7: mod_base = OTHER; note = 2'-O-methyl-adenosine
  modified_base 8: mod_base = OTHER; note = 2'-fluoro-guanosine
  modified_base 9: mod_base = OTHER; note = 2'-fluoro-cytidine
  modified_base 10: mod_base = OTHER; note = 2'-fluoro-cytidine
  modified_base 11: mod_base = OTHER; note = 2'-fluoro-adenosine
  modified_base 12: mod_base = OTHER; note = 2'-O-methyl-uridine
  modified_base 13: mod_base = OTHER; note = 2'-O-methyl-guanosine
  modified_base 14: mod_base = OTHER; note = 2'-O-methyl-uridine
  modified_base 15: mod_base = OTHER; note = 2'-O-methyl-guanosine
  modified_base 16: mod_base = OTHER; note = 2'-O-methyl-guanosine
  modified_base 17: mod_base = OTHER; note = 2'-O-methyl-uridine
  modified_base 18: mod_base = OTHER; note = 2'-O-methyl-cytidine with phosphorothioate linkage
  modified_base 19: mod_base = OTHER; note = 2'-O-methyl-cytidine with phosphorothioate linkage
  modified_base 20: mod_base = OTHER; note = 2'-O-methyl-adenosine
  modified_base 20: mod_base = OTHER; note = Nucleotide conjugated to 3 iterations of (2R,3R,4R,5S)-5-(3-(5-(((2R,3R,4R,5R,6R)- 3-acetamido-4,5-dihydroxy-6-(hydroxymethyl)tetrahydro-2H-py ran-2-yl)oxy) pentanamido)propyl)-2-((hydroxyl)methyl)-4-methoxytetrahydr ofuran-3-oxyl
gagcaaagccatgtggtcca

SEQ ID NO: 1057 - RNA, 20 nt, synthetic construct
  source 1..20: mol_type = other RNA
  modified_base 1: mod_base = OTHER; note = 2'-O-methyl-cytidine with phosphorothioate linkage
  modified_base 2: mod_base = OTHER; note = 2'-O-methyl-cytidine with phosphorothioate linkage
  modified_base 3: mod_base = OTHER; note = 2'-O-methyl-adenosine
  modified_base 4: mod_base = OTHER; note = 2'-O-methyl-cytidine
  modified_base 5: mod_base = OTHER; note = 2'-O-methyl-uridine
  modified_base 6: mod_base = OTHER; note = 2'-fluoro-guanosine
  modified_base 7: mod_base = OTHER; note = 2'-O-methyl-uridine
  modified_base 8: mod_base = OTHER; note = 2'-fluoro-cytidine
  modified_base 9: mod_base = OTHER; note = 2'-fluoro-adenosine
  modified_base 10: mod_base = OTHER; note = 2'-fluoro-cytidine
  modified_base 11: mod_base = OTHER; note = 2'-fluoro-adenosine
  modified_base 12: mod_base = OTHER; note = 2'-O-methyl-guanosine
  modified_base 13: mod_base = OTHER; note = 2'-O-methyl-guanosine
  modified_base 14: mod_base = OTHER; note = 2'-O-methyl-adenosine
  modified_base 15: mod_base = OTHER; note = 2'-O-methyl-adenosine
  modified_base 16: mod_base = OTHER; note = 2'-O-methyl-guanosine
  modified_base 17: mod_base = OTHER; note = 2'-O-methyl-guanosine
  modified_base 18: mod_base = OTHER; note = 2'-O-methyl-adenosine with phosphorothioate linkage
  modified_base 19: mod_base = OTHER; note = 2'-O-methyl-cytidine with phosphorothioate linkage
  modified_base 20: mod_base = OTHER; note = 2'-O-methyl-adenosine
  modified_base 20: mod_base = OTHER; note = Nucleotide conjugated to 3 iterations of (2R,3R,4R,5S)-5-(3-(5-(((2R,3R,4R,5R,6R)- 3-acetamido-4,5-dihydroxy-6-(hydroxymethyl)tetrahydro-2H-py ran-2-yl)oxy) pentanamido)propyl)-2-((hydroxyl)methyl)-4-methoxytetrahydr ofuran-3-oxyl
ccactgtcacaggaaggaca

SEQ ID NO: 1058 - RNA, 20 nt, synthetic construct
  source 1..20: mol_type = other RNA
  modified_base 1: mod_base = OTHER; note = 2'-O-methyl-uridine with phosphorothioate linkage
  modified_base 2: mod_base = OTHER; note = 2'-O-methyl-guanosine with phosphorothioate linkage
  modified_base 3: mod_base = OTHER; note = 2'-O-methyl-guanosine
  modified_base 4: mod_base = OTHER; note = 2'-O-methyl-uridine
  modified_base 5: mod_base = OTHER; note = 2'-O-methyl-guanosine
  modified_base 6: mod_base = OTHER; note = 2'-fluoro-guanosine
  modified_base 7: mod_base = OTHER; note = 2'-O-methyl-cytidine
  modified_base 8: mod_base = OTHER; note = 2'-fluoro-cytidine
  modified_base 9: mod_base = OTHER; note = 2'-fluoro-uridine
  modified_base 10: mod_base = OTHER; note = 2'-fluoro-guanosine
  modified_base 11: mod_base = OTHER; note = 2'-fluoro-adenosine
  modified_base 12: mod_base = OTHER; note = 2'-O-methyl-cytidine
  modified_base 13: mod_base = OTHER; note = 2'-O-methyl-cytidine
  modified_base 14: mod_base = OTHER; note = 2'-O-methyl-adenosine
  modified_base 15: mod_base = OTHER; note = 2'-O-methyl-guanosine
  modified_base 16: mod_base = OTHER; note = 2'-O-methyl-guanosine
  modified_base 17: mod_base = OTHER; note = 2'-O-methyl-adenosine
  modified_base 18: mod_base = OTHER; note = 2'-O-methyl-adenosine with phosphorothioate linkage
  modified_base 19: mod_base = OTHER; note = 2'-O-methyl-cytidine with phosphorothioate linkage
  modified_base 20: mod_base = OTHER; note = 2'-O-methyl-adenosine
  modified_base 20: mod_base = OTHER; note = Nucleotide conjugated to 3 iterations of (2R,3R,4R,5S)-5-(3-(5-(((2R,3R,4R,5R,6R)- 3-acetamido-4,5-dihydroxy-6-(hydroxymethyl)tetrahydro-2H-py ran-2-yl)oxy) pentanamido)propyl)-2-((hydroxyl)methyl)-4-methoxytetrahydr ofuran-3-oxyl
tggtggcctgaccaggaaca

SEQ ID NO: 1059 - RNA, 20 nt, synthetic construct
  source 1..20: mol_type = other RNA
  modified_base 1: mod_base = OTHER; note = 2'-O-methyl-guanosine with phosphorothioate linkage
  modified_base 2: mod_base = OTHER; note = 2'-O-methyl-cytidine with phosphorothioate linkage
  modified_base 3: mod_base = OTHER; note = 2'-O-methyl-cytidine
  modified_base 4: mod_base = OTHER; note = 2'-O-methyl-adenosine
  modified_base 5: mod_base = OTHER; note = 2'-O-methyl-adenosine
  modified_base 6: mod_base = OTHER; note = 2'-fluoro-guanosine
  modified_base 7: mod_base = OTHER; note = 2'-O-methyl-cytidine
  modified_base 8: mod_base = OTHER; note = 2'-fluoro-uridine
  modified_base 9: mod_base = OTHER; note = 2'-fluoro-uridine
  modified_base 10: mod_base = OTHER; note = 2'-fluoro-guanosine
  modified_base 11: mod_base = OTHER; note = 2'-fluoro-guanosine
  modified_base 12: mod_base = OTHER; note = 2'-O-methyl-uridine
  modified_base 13: mod_base = OTHER; note = 2'-O-methyl-cytidine
  modified_base 14: mod_base = OTHER; note = 2'-O-methyl-adenosine
  modified_base 15: mod_base = OTHER; note = 2'-O-methyl-uridine
  modified_base 16: mod_base = OTHER; note = 2'-O-methyl-cytidine
  modified_base 17: mod_base = OTHER; note = 2'-O-methyl-uridine
  modified_base 18: mod_base = OTHER; note = 2'-O-methyl-adenosine with phosphorothioate linkage
  modified_base 19: mod_base = OTHER; note = 2'-O-methyl-uridine with phosphorothioate linkage
  modified_base 20: mod_base = OTHER; note = 2'-O-methyl-adenosine
  modified_base 20: mod_base = OTHER; note = Nucleotide conjugated to 3 iterations of (2R,3R,4R,5S)-5-(3-(5-(((2R,3R,4R,5R,6R)- 3-acetamido-4,5-dihydroxy-6-(hydroxymethyl)tetrahydro-2H-py ran-2-yl)oxy) pentanamido)propyl)-2-((hydroxyl)methyl)-4-methoxytetrahydr ofuran-3-oxyl
gccaagcttggtcatctata

SEQ ID NO: 1060 - RNA, 20 nt, synthetic construct
  source 1..20: mol_type = other RNA
  modified_base 1: mod_base = OTHER; note = 2'-O-methyl-guanosine with phosphorothioate linkage
  modified_base 2: mod_base = OTHER; note = 2'-O-methyl-uridine with phosphorothioate linkage
  modified_base 3: mod_base = OTHER; note = 2'-O-methyl-guanosine
  modified_base 4: mod_base = OTHER; note = 2'-O-methyl-cytidine
  modified_base 5: mod_base = OTHER; note = 2'-O-methyl-adenosine
  modified_base 6: mod_base = OTHER; note = 2'-fluoro-guanosine
  modified_base 7: mod_base = OTHER; note = 2'-O-methyl-guanosine
  modified_base 8: mod_base = OTHER; note = 2'-fluoro-adenosine
  modified_base 9: mod_base = OTHER; note = 2'-fluoro-guanosine
  modified_base 10: mod_base = OTHER; note = 2'-fluoro-uridine
  modified_base 11: mod_base = OTHER; note = 2'-fluoro-guanosine
  modified_base 12: mod_base = OTHER; note = 2'-O-methyl-cytidine
  modified_base 13: mod_base = OTHER; note = 2'-O-methyl-uridine
  modified_base 14: mod_base = OTHER; note = 2'-O-methyl-adenosine
  modified_base 15: mod_base = OTHER; note = 2'-O-methyl-cytidine
  modified_base 16: mod_base = OTHER; note = 2'-O-methyl-cytidine
  modified_base 17: mod_base = OTHER; note = 2'-O-methyl-adenosine
  modified_base 18: mod_base = OTHER; note = 2'-O-methyl-cytidine with phosphorothioate linkage
  modified_base 19: mod_base = OTHER; note = 2'-O-methyl-guanosine with phosphorothioate linkage
  modified_base 20: mod_base = OTHER; note = 2'-O-methyl-adenosine
  modified_base 20: mod_base = OTHER; note = Nucleotide conjugated to 3 iterations of (2R,3R,4R,5S)-5-(3-(5-(((2R,3R,4R,5R,6R)- 3-acetamido-4,5-dihydroxy-6-(hydroxymethyl)tetrahydro-2H-py ran-2-yl)oxy) pentanamido)propyl)-2-((hydroxyl)methyl)-4-methoxytetrahydr ofuran-3-oxyl
gtgcaggagtgctaccacga

SEQ ID NO: 1061 - RNA, 20 nt, synthetic construct
  source 1..20: mol_type = other RNA
  modified_base 1: mod_base = OTHER; note = 2'-O-methyl-cytidine with phosphorothioate linkage
  modified_base 2: mod_base = OTHER; note = 2'-O-methyl-cytidine with phosphorothioate linkage
  modified_base 3: mod_base = OTHER; note = 2'-O-methyl-uridine
  modified_base 4: mod_base = OTHER; note = 2'-O-methyl-adenosine
  modified_base 5: mod_base = OTHER; note = 2'-O-methyl-guanosine
  modified_base 6: mod_base = OTHER; note = 2'-fluoro-adenosine
  modified_base 7: mod_base = OTHER; note = 2'-O-methyl-guanosine
  modified_base 8: mod_base = OTHER; note = 2'-fluoro-guanosine
  modified_base 9: mod_base = OTHER; note = 2'-fluoro-cytidine
  modified_base 10: mod_base = OTHER; note = 2'-fluoro-uridine
  modified_base 11: mod_base = OTHER; note = 2'-fluoro-cytidine
  modified_base 12: mod_base = OTHER; note = 2'-O-methyl-cytidine
  modified_base 13: mod_base = OTHER; note = 2'-O-methyl-uridine
  modified_base 14: mod_base = OTHER; note = 2'-O-methyl-uridine
  modified_base 15: mod_base = OTHER; note = 2'-O-methyl-cytidine
  modified_base 16: mod_base = OTHER; note = 2'-O-methyl-cytidine
  modified_base 17: mod_base = OTHER; note = 2'-O-methyl-guanosine
  modified_base 18: mod_base = OTHER; note = 2'-O-methyl-adenosine with phosphorothioate linkage
  modified_base 19: mod_base = OTHER; note = 2'-O-methyl-adenosine with phosphorothioate linkage
  modified_base 20: mod_base = OTHER; note = 2'-O-methyl-adenosine
  modified_base 20: mod_base = OTHER; note = Nucleotide conjugated to 3 iterations of (2R,3R,4R,5S)-5-(3-(5-(((2R,3R,4R,5R,6R)- 3-acetamido-4,5-dihydroxy-6-(hydroxymethyl)tetrahydro-2H-py ran-2-yl)oxy) pentanamido)propyl)-2-((hydroxyl)methyl)-4-methoxytetrahydr ofuran-3-oxyl
cctagaggctccttccgaaa

SEQ ID NO: 1062 - RNA, 20 nt, synthetic construct
  source 1..20: mol_type = other RNA
  modified_base 1: mod_base = OTHER; note = 2'-O-methyl-adenosine with phosphorothioate linkage
  modified_base 2: mod_base = OTHER; note = 2'-O-methyl-cytidine with phosphorothioate linkage
  modified_base 3: mod_base = OTHER; note = 2'-O-methyl-cytidine
  modified_base 4: mod_base = OTHER; note = 2'-O-methyl-uridine
  modified_base 5: mod_base = OTHER; note = 2'-O-methyl-guanosine
  modified_base 6: mod_base = OTHER; note = 2'-fluoro-adenosine
  modified_base 7: mod_base = OTHER; note = 2'-O-methyl-guanosine
  modified_base 8: mod_base = OTHER; note = 2'-fluoro-adenosine
  modified_base 9: mod_base = OTHER; note = 2'-fluoro-adenosine
  modified_base 10: mod_base = OTHER; note = 2'-fluoro-adenosine
  modified_base 11: mod_base = OTHER; note = 2'-fluoro-adenosine
  modified_base 12: mod_base = OTHER; note = 2'-O-methyl-guanosine
  modified_base 13: mod_base = OTHER; note = 2'-O-methyl-cytidine
  modified_base 14: mod_base = OTHER; note = 2'-O-methyl-cytidine
  modified_base 15: mod_base = OTHER; note = 2'-O-methyl-cytidine
  modified_base 16: mod_base = OTHER; note = 2'-O-methyl-uridine
  modified_base 17: mod_base = OTHER; note = 2'-O-methyl-guanosine
  modified_base 18: mod_base = OTHER; note = 2'-O-methyl-uridine with phosphorothioate linkage
  modified_base 19: mod_base = OTHER; note = 2'-O-methyl-guanosine with phosphorothioate linkage
  modified_base 20: mod_base = OTHER; note = 2'-O-methyl-adenosine
  modified_base 20: mod_base = OTHER; note = Nucleotide conjugated to 3 iterations of (2R,3R,4R,5S)-5-(3-(5-(((2R,3R,4R,5R,6R)- 3-acetamido-4,5-dihydroxy-6-(hydroxymethyl)tetrahydro-2H-py ran-2-yl)oxy) pentanamido)propyl)-2-((hydroxyl)methyl)-4-methoxytetrahydr ofuran-3-oxyl
acctgagaaaagccctgtga

SEQ ID NO: 1063 - RNA, 20 nt, synthetic construct
  source 1..20: mol_type = other RNA
  modified_base 1: mod_base = OTHER; note = 2'-O-methyl-guanosine with phosphorothioate linkage
  modified_base 2: mod_base = OTHER; note = 2'-O-methyl-cytidine with phosphorothioate linkage
  modified_base 3: mod_base = OTHER; note = 2'-O-methyl-adenosine
  modified_base 4: mod_base = OTHER; note = 2'-O-methyl-guanosine
  modified_base 5: mod_base = OTHER; note = 2'-O-methyl-cytidine
  modified_base 6: mod_base = OTHER; note = 2'-fluoro-cytidine
  modified_base 7: mod_base = OTHER; note = 2'-O-methyl-cytidine
  modified_base 8: mod_base = OTHER; note = 2'-fluoro-cytidine
  modified_base 9: mod_base = OTHER; note = 2'-fluoro-uridine
  modified_base 10: mod_base = OTHER; note = 2'-fluoro-uridine
  modified_base 11: mod_base = OTHER; note = 2'-fluoro-guanosine
  modified_base 12: mod_base = OTHER; note = 2'-O-methyl-guanosine
  modified_base 13: mod_base = OTHER; note = 2'-O-methyl-uridine
  modified_base 14: mod_base = OTHER; note = 2'-O-methyl-guanosine
  modified_base 15: mod_base = OTHER; note = 2'-O-methyl-uridine
  modified_base 16: mod_base = OTHER; note = 2'-O-methyl-uridine
  modified_base 17: mod_base = OTHER; note = 2'-O-methyl-adenosine
  modified_base 18: mod_base = OTHER; note = 2'-O-methyl-uridine with phosphorothioate linkage
  modified_base 19: mod_base = OTHER; note = 2'-O-methyl-adenosine with phosphorothioate linkage
  modified_base 20: mod_base = OTHER; note = 2'-O-methyl-adenosine
  modified_base 20: mod_base = OTHER; note = Nucleotide conjugated to 3 iterations of (2R,3R,4R,5S)-5-(3-(5-(((2R,3R,4R,5R,6R)- 3-acetamido-4,5-dihydroxy-6-(hydroxymethyl)tetrahydro-2H-py ran-2-yl)oxy) pentanamido)propyl)-2-((hydroxyl)methyl)-4-methoxytetrahydr ofuran-3-oxyl
gcagccccttggtgttataa

SEQ ID NO: 1064 - RNA, 20 nt, synthetic construct
  source 1..20: mol_type = other RNA
  modified_base 1: mod_base = OTHER; note = 2'-O-methyl-cytidine with phosphorothioate linkage
  modified_base 2: mod_base = OTHER; note = 2'-O-methyl-cytidine with phosphorothioate linkage
  modified_base 3: mod_base = OTHER; note = 2'-O-methyl-cytidine
  modified_base 4: mod_base = OTHER; note = 2'-O-methyl-adenosine
  modified_base 5: mod_base = OTHER; note = 2'-O-methyl-guanosine
  modified_base 6: mod_base = OTHER; note = 2'-fluoro-adenosine
  modified_base 7: mod_base = OTHER; note = 2'-O-methyl-adenosine
  modified_base 8: mod_base = OTHER; note = 2'-fluoro-adenosine
  modified_base 9: mod_base = OTHER; note = 2'-fluoro-adenosine
  modified_base 10: mod_base = OTHER; note = 2'-fluoro-cytidine
  modified_base 11: mod_base = OTHER; note = 2'-fluoro-uridine
  modified_base 12: mod_base = OTHER; note = 2'-O-methyl-adenosine
  modified_base 13: mod_base = OTHER; note = 2'-O-methyl-cytidine
  modified_base 14: mod_base = OTHER; note = 2'-O-methyl-cytidine
  modified_base 15: mod_base = OTHER; note = 2'-O-methyl-cytidine
  modified_base 16: mod_base = OTHER; note = 2'-O-methyl-adenosine
  modified_base 17: mod_base = OTHER; note = 2'-O-methyl-adenosine
  modified_base 18: mod_base = OTHER; note = 2'-O-methyl-adenosine with phosphorothioate linkage
  modified_base 19: mod_base = OTHER; note = 2'-O-methyl-uridine with phosphorothioate linkage
  modified_base 20: mod_base = OTHER; note = 2'-O-methyl-adenosine
  modified_base 20: mod_base = OTHER; note = Nucleotide conjugated to 3 iterations of (2R,3R,4R,5S)-5-(3-(5-(((2R,3R,4R,5R,6R)- 3-acetamido-4,5-dihydroxy-6-(hydroxymethyl)tetrahydro-2H-py ran-2-yl)oxy) pentanamido)propyl)-2-((hydroxyl)methyl)-4-methoxytetrahydr ofuran-3-oxyl
cccagaaaactacccaaata

SEQ ID NO: 1065 - RNA, 20 nt, synthetic construct
  source 1..20: mol_type = other RNA
  modified_base 1: mod_base = OTHER; note = 2'-O-methyl-cytidine with phosphorothioate linkage
  modified_base 2: mod_base = OTHER; note = 2'-O-methyl-uridine with phosphorothioate linkage
  modified_base 3: mod_base = OTHER; note = 2'-O-methyl-cytidine
  modified_base 4: mod_base = OTHER; note = 2'-O-methyl-cytidine
  modified_base 5: mod_base = OTHER; note = 2'-O-methyl-uridine
  modified_base 6: mod_base = OTHER; note = 2'-fluoro-uridine
  modified_base 7: mod_base = OTHER; note = 2'-O-methyl-cytidine
  modified_base 8: mod_base = OTHER; note = 2'-fluoro-cytidine
  modified_base 9: mod_base = OTHER; note = 2'-fluoro-guanosine
  modified_base 10: mod_base = OTHER; note = 2'-fluoro-adenosine
  modified_base 11: mod_base = OTHER; note = 2'-fluoro-adenosine
  modified_base 12: mod_base = OTHER; note = 2'-O-methyl-cytidine
  modified_base 13: mod_base = OTHER; note = 2'-O-methyl-adenosine
  modified_base 14: mod_base = OTHER; note = 2'-O-methyl-adenosine
  modified_base 15: mod_base = OTHER; note = 2'-O-methyl-guanosine
  modified_base 16: mod_base = OTHER; note = 2'-O-methyl-cytidine
  modified_base 17: mod_base = OTHER; note = 2'-O-methyl-adenosine
  modified_base 18: mod_base = OTHER; note = 2'-O-methyl-cytidine with phosphorothioate linkage
  modified_base 19: mod_base = OTHER; note = 2'-O-methyl-cytidine with phosphorothioate linkage
  modified_base 20: mod_base = OTHER; note = 2'-O-methyl-adenosine
  modified_base 20: mod_base = OTHER; note = Nucleotide conjugated to 3 iterations of (2R,3R,4R,5S)-5-(3-(5-(((2R,3R,4R,5R,6R)- 3-acetamido-4,5-dihydroxy-6-(hydroxymethyl)tetrahydro-2H-py ran-2-yl)oxy) pentanamido)propyl)-2-((hydroxyl)methyl)-4-methoxytetrahydr ofuran-3-oxyl
ctccttccgaacaagcacca

SEQ ID NO: 1066 - RNA, 20 nt, synthetic construct
  source 1..20: mol_type = other RNA
  modified_base 1: mod_base = OTHER; note = 2'-O-methyl-adenosine with phosphorothioate linkage
  modified_base 2: mod_base = OTHER; note = 2'-O-methyl-guanosine with phosphorothioate linkage
  modified_base 3: mod_base = OTHER; note = 2'-O-methyl-adenosine
  modified_base 4: mod_base = OTHER; note = 2'-O-methyl-adenosine
  modified_base 5: mod_base = OTHER; note = 2'-O-methyl-uridine
  modified_base 6: mod_base = OTHER; note = 2'-fluoro-cytidine
  modified_base 7: mod_base = OTHER; note = 2'-O-methyl-adenosine
  modified_base 8: mod_base = OTHER; note = 2'-fluoro-guanosine
  modified_base 9: mod_base = OTHER; note = 2'-fluoro-guanosine
  modified_base 10: mod_base = OTHER; note = 2'-fluoro-uridine
  modified_base 11: mod_base = OTHER; note = 2'-fluoro-guanosine
  modified_base 12: mod_base = OTHER; note = 2'-O-methyl-uridine
  modified_base 13: mod_base = OTHER; note = 2'-O-methyl-cytidine
  modified_base 14: mod_base = OTHER; note = 2'-O-methyl-cytidine
  modified_base 15: mod_base = OTHER; note = 2'-O-methyl-uridine
  modified_base 16: mod_base = OTHER; note = 2'-O-methyl-adenosine
  modified_base 17: mod_base = OTHER; note = 2'-O-methyl-guanosine
  modified_base 18: mod_base = OTHER; note = 2'-O-methyl-adenosine with phosphorothioate linkage
  modified_base 19: mod_base = OTHER; note = 2'-O-methyl-guanosine with phosphorothioate linkage
  modified_base 20: mod_base = OTHER; note = 2'-O-methyl-adenosine
  modified_base 20: mod_base = OTHER; note = Nucleotide conjugated to 3 iterations of (2R,3R,4R,5S)-5-(3-(5-(((2R,3R,4R,5R,6R)- 3-acetamido-4,5-dihydroxy-6-(hydroxymethyl)tetrahydro-2H-py ran-2-yl)oxy) pentanamido)propyl)-2-((hydroxyl)methyl)-4-methoxytetrahydr ofuran-3-oxyl
agaatcaggtgtcctagaga

SEQ ID NO: 1067 - RNA, 20 nt, synthetic construct
  source 1..20: mol_type = other RNA
  modified_base 1: mod_base = OTHER; note = 2'-O-methyl-adenosine with phosphorothioate linkage
  modified_base 2: mod_base = OTHER; note = 2'-O-methyl-adenosine with phosphorothioate linkage
  modified_base 3: mod_base = OTHER; note = 2'-O-methyl-adenosine
  modified_base 4: mod_base = OTHER; note = 2'-O-methyl-cytidine
  modified_base 5: mod_base = OTHER; note = 2'-O-methyl-uridine
  modified_base 6: mod_base = OTHER; note = 2'-fluoro-adenosine
  modified_base 7: mod_base = OTHER; note = 2'-O-methyl-cytidine
  modified_base 8: mod_base = OTHER; note = 2'-fluoro-cytidine
  modified_base 9: mod_base = OTHER; note = 2'-fluoro-cytidine
  modified_base 10: mod_base = OTHER; note = 2'-fluoro-adenosine
  modified_base 11: mod_base = OTHER; note = 2'-fluoro-adenosine
  modified_base 12: mod_base = OTHER; note = 2'-O-methyl-adenosine
  modified_base 13: mod_base = OTHER; note = 2'-O-methyl-uridine
  modified_base 14: mod_base = OTHER; note = 2'-O-methyl-guanosine
  modified_base 15: mod_base = OTHER; note = 2'-O-methyl-cytidine
  modified_base 16: mod_base = OTHER; note = 2'-O-methyl-uridine
  modified_base 17: mod_base = OTHER; note = 2'-O-methyl-guanosine
  modified_base 18: mod_base = OTHER; note = 2'-O-methyl-guanosine with phosphorothioate linkage
  modified_base 19: mod_base = OTHER; note = 2'-O-methyl-cytidine with phosphorothioate linkage
  modified_base 20: mod_base = OTHER; note = 2'-O-methyl-adenosine
  modified_base 20: mod_base = OTHER; note = Nucleotide conjugated to 3 iterations of (2R,3R,4R,5S)-5-(3-(5-(((2R,3R,4R,5R,6R)- 3-acetamido-4,5-dihydroxy-6-(hydroxymethyl)tetrahydro-2H-py ran-2-yl)oxy) pentanamido)propyl)-2-((hydroxyl)methyl)-4-methoxytetrahydr ofuran-3-oxyl
aaactacccaaatgctggca

SEQ ID NO: 1068 - RNA, 20 nt, synthetic construct
  source 1..20: mol_type = other RNA
  modified_base 1: mod_base = OTHER; note = 2'-O-methyl-cytidine with phosphorothioate linkage
  modified_base 2: mod_base = OTHER; note = 2'-O-methyl-uridine with phosphorothioate linkage
  modified_base 3: mod_base = OTHER; note = 2'-O-methyl-adenosine
  modified_base 4: mod_base = OTHER; note = 2'-O-methyl-cytidine
  modified_base 5: mod_base = OTHER; note = 2'-O-methyl-uridine
  modified_base 6: mod_base = OTHER; note = 2'-fluoro-guanosine
  modified_base 7: mod_base = OTHER; note = 2'-O-methyl-cytidine
  modified_base 8: mod_base = OTHER; note = 2'-fluoro-adenosine
  modified_base 9: mod_base = OTHER; note = 2'-fluoro-guanosine
  modified_base 10: mod_base = OTHER; note = 2'-fluoro-guanosine
  modified_base 11: mod_base = OTHER; note = 2'-fluoro-adenosine
  modified_base 12: mod_base = OTHER; note = 2'-O-methyl-adenosine
  modified_base 13: mod_base = OTHER; note = 2'-O-methyl-uridine
  modified_base 14: mod_base = OTHER; note = 2'-O-methyl-cytidine
  modified_base 15: mod_base = OTHER; note = 2'-O-methyl-cytidine
  modified_base 16: mod_base = OTHER; note = 2'-O-methyl-adenosine
  modified_base 17: mod_base = OTHER; note = 2'-O-methyl-guanosine
  modified_base 18: mod_base = OTHER; note = 2'-O-methyl-adenosine with phosphorothioate linkage
  modified_base 19: mod_base = OTHER; note = 2'-O-methyl-uridine with phosphorothioate linkage
  modified_base 20: mod_base = OTHER; note = 2'-O-methyl-adenosine
  modified_base 20: mod_base = OTHER; note = Nucleotide conjugated to 3 iterations of (2R,3R,4R,5S)-5-(3-(5-(((2R,3R,4R,5R,6R)- 3-acetamido-4,5-dihydroxy-6-(hydroxymethyl)tetrahydro-2H-py ran-2-yl)oxy) pentanamido)propyl)-2-((hydroxyl)methyl)-4-methoxytetrahydr ofuran-3-oxyl
ctactgcaggaatccagata

SEQ ID NO: 1069 - RNA, 20 nt, synthetic construct
  source 1..20: mol_type = other RNA
  modified_base 1: mod_base = OTHER; note = 2'-O-methyl-cytidine with phosphorothioate linkage
  modified_base 2: mod_base = OTHER; note = 2'-O-methyl-adenosine with phosphorothioate linkage
  modified_base 3: mod_base = OTHER; note = 2'-O-methyl-adenosine
  modified_base 4: mod_base = OTHER; note = 2'-O-methyl-guanosine
  modified_base 5: mod_base = OTHER; note = 2'-O-methyl-cytidine
  modified_base 6: mod_base = OTHER; note = 2'-fluoro-cytidine
  modified_base 7: mod_base = OTHER; note = 2'-O-methyl-uridine
  modified_base 8: mod_base = OTHER; note = 2'-fluoro-adenosine
  modified_base 9: mod_base = OTHER; note = 2'-fluoro-guanosine
  modified_base 10: mod_base = OTHER; note = 2'-fluoro-adenosine
  modified_base 11: mod_base = OTHER; note = 2'-fluoro-guanosine
  modified_base 12: mod_base = OTHER; note = 2'-O-methyl-guanosine
  modified_base 13: mod_base = OTHER; note = 2'-O-methyl-cytidine
  modified_base 14: mod_base = OTHER; note = 2'-O-methyl-uridine
  modified_base 15: mod_base = OTHER; note = 2'-O-methyl-cytidine
  modified_base 16: mod_base = OTHER; note = 2'-O-methyl-cytidine
  modified_base 17: mod_base = OTHER; note = 2'-O-methyl-uridine
  modified_base 18: mod_base = OTHER; note = 2'-O-methyl-uridine with phosphorothioate linkage
  modified_base 19: mod_base = OTHER; note = 2'-O-methyl-cytidine with phosphorothioate linkage
  modified_base 20: mod_base = OTHER; note = 2'-O-methyl-adenosine
  modified_base 20: mod_base = OTHER; note = Nucleotide conjugated to 3 iterations of (2R,3R,4R,5S)-5-(3-(5-(((2R,3R,4R,5R,6R)- 3-acetamido-4,5-dihydroxy-6-(hydroxymethyl)tetrahydro-2H-py ran-2-yl)oxy) pentanamido)propyl)-2-((hydroxyl)methyl)-4-methoxytetrahydr ofuran-3-oxyl
caagcctagaggctccttca

SEQ ID NO: 1070 - RNA, 20 nt, synthetic construct
  source 1..20: mol_type = other RNA
  modified_base 1: mod_base = OTHER; note = 2'-O-methyl-guanosine with phosphorothioate linkage
  modified_base 2: mod_base = OTHER; note = 2'-O-methyl-adenosine with phosphorothioate linkage
  modified_base 3: mod_base = OTHER; note = 2'-O-methyl-adenosine
  modified_base 4: mod_base = OTHER; note = 2'-O-methyl-guanosine
  modified_base 5: mod_base = OTHER; note = 2'-O-methyl-guanosine
  modified_base 6: mod_base = OTHER; note = 2'-fluoro-adenosine
  modified_base 7: mod_base = OTHER; note = 2'-O-methyl-cytidine
  modified_base 8: mod_base = OTHER; note = 2'-fluoro-adenosine
  modified_base 9: mod_base = OTHER; note = 2'-fluoro-uridine
  modified_base 10: mod_base = OTHER; note = 2'-fluoro-guanosine
  modified_base 11: mod_base = OTHER; note = 2'-fluoro-uridine
  modified_base 12: mod_base = OTHER; note = 2'-O-methyl-cytidine
  modified_base 13: mod_base = OTHER; note = 2'-O-methyl-adenosine
  modified_base 14: mod_base = OTHER; note = 2'-O-methyl-adenosine
  modified_base 15: mod_base = OTHER; note = 2'-O-methyl-uridine
  modified_base 16: mod_base = OTHER; note = 2'-O-methyl-cytidine
  modified_base 17: mod_base = OTHER; note = 2'-O-methyl-uridine
  modified_base 18: mod_base = OTHER; note = 2'-O-methyl-uridine with phosphorothioate linkage
  modified_base 19: mod_base = OTHER; note = 2'-O-methyl-guanosine with phosphorothioate linkage
  modified_base 20: mod_base = OTHER; note = 2'-O-methyl-adenosine
  modified_base 20: mod_base = OTHER; note = Nucleotide conjugated to 3 iterations of (2R,3R,4R,5S)-5-(3-(5-(((2R,3R,4R,5R,6R)- 3-acetamido-4,5-dihydroxy-6-(hydroxymethyl)tetrahydro-2H-py ran-2-yl)oxy) pentanamido)propyl)-2-((hydroxyl)methyl)-4-methoxytetrahydr ofuran-3-oxyl
gaaggacatgtcaatcttga

SEQ ID NO: 1071 - RNA, 20 nt, synthetic construct
  source 1..20: mol_type = other RNA
  modified_base 1: mod_base = OTHER; note = 2'-O-methyl-uridine with phosphorothioate linkage
  modified_base 2: mod_base = OTHER; note = 2'-O-methyl-cytidine with phosphorothioate linkage
  modified_base 3: mod_base = OTHER; note = 2'-O-methyl-cytidine
  modified_base 4: mod_base = OTHER; note = 2'-O-methyl-adenosine
  modified_base 5: mod_base = OTHER; note = 2'-O-methyl-cytidine
  modified_base 6: mod_base = OTHER; note = 2'-fluoro-cytidine
  modified_base 7: mod_base = OTHER; note = 2'-O-methyl-adenosine
  modified_base 8: mod_base = OTHER; note = 2'-fluoro-cytidine
  modified_base 9: mod_base = OTHER; note = 2'-fluoro-uridine
  modified_base 10: mod_base = OTHER; note = 2'-fluoro-guanosine
  modified_base 11: mod_base = OTHER; note = 2'-fluoro-uridine
  modified_base 12: mod_base = OTHER; note = 2'-O-methyl-cytidine
  modified_base 13: mod_base = OTHER; note = 2'-O-methyl-adenosine
  modified_base 14: mod_base = OTHER; note = 2'-O-methyl-cytidine
  modified_base 15: mod_base = OTHER; note = 2'-O-methyl-adenosine
  modified_base 16: mod_base = OTHER; note = 2'-O-methyl-guanosine
  modified_base 17: mod_base = OTHER; note = 2'-O-methyl-guanosine
  modified_base 18: mod_base = OTHER; note = 2'-O-methyl-adenosine with phosphorothioate linkage
  modified_base 19: mod_base = OTHER; note = 2'-O-methyl-adenosine with phosphorothioate linkage
  modified_base 20: mod_base = OTHER; note = 2'-O-methyl-adenosine
  modified_base 20: mod_base = OTHER; note = Nucleotide conjugated to 3 iterations of (2R,3R,4R,5S)-5-(3-(5-(((2R,3R,4R,5R,6R)- 3-acetamido-4,5-dihydroxy-6-(hydroxymethyl)tetrahydro-2H-py ran-2-yl)oxy) pentanamido)propyl)-2-((hydroxyl)methyl)-4-methoxytetrahydr ofuran-3-oxyl
tccaccactgtcacaggaaa

SEQ ID NO: 1072 - RNA, 20 nt, synthetic construct
  source 1..20: mol_type = other RNA
  modified_base 1: mod_base = OTHER; note = 2'-O-methyl-adenosine with phosphorothioate linkage
  modified_base 2: mod_base = OTHER; note = 2'-O-methyl-adenosine with phosphorothioate linkage
  modified_base 3: mod_base = OTHER; note = 2'-O-methyl-uridine
  modified_base 4: mod_base = OTHER; note = 2'-O-methyl-cytidine
  modified_base 5: mod_base = OTHER; note = 2'-O-methyl-uridine
  modified_base 6: mod_base = OTHER; note = 2'-fluoro-uridine
  modified_base 7: mod_base = OTHER; note = 2'-O-methyl-guanosine
  modified_base 8: mod_base = OTHER; note = 2'-fluoro-guanosine
  modified_base 9: mod_base = OTHER; note = 2'-fluoro-uridine
  modified_base 10: mod_base = OTHER; note = 2'-fluoro-cytidine
  modified_base 11: mod_base = OTHER; note = 2'-fluoro-adenosine
  modified_base 12: mod_base = OTHER; note = 2'-O-methyl-uridine
  modified_base 13: mod_base = OTHER; note = 2'-O-methyl-cytidine
  modified_base 14: mod_base = OTHER; note = 2'-O-methyl-cytidine
  modified_base 15: mod_base = OTHER; note = 2'-O-methyl-adenosine
  modified_base 16: mod_base = OTHER; note = 2'-O-methyl-uridine
  modified_base 17: mod_base = OTHER; note = 2'-O-methyl-guanosine
  modified_base 18: mod_base = OTHER; note = 2'-O-methyl-adenosine with phosphorothioate linkage
  modified_base 19: mod_base = OTHER; note = 2'-O-methyl-cytidine with phosphorothioate linkage
  modified_base 20: mod_base = OTHER; note = 2'-O-methyl-adenosine
  modified_base 20: mod_base = OTHER; note = Nucleotide conjugated to 3 iterations of (2R,3R,4R,5S)-5-(3-(5-(((2R,3R,4R,5R,6R)- 3-acetamido-4,5-dihydroxy-6-(hydroxymethyl)tetrahydro-2H-py ran-2-yl)oxy) pentanamido)propyl)-2-((hydroxyl)methyl)-4-methoxytetrahydr ofuran-3-oxyl
aatcttggtcatccatgaca

SEQ ID NO: 1073 - RNA, 20 nt, synthetic construct
  source 1..20: mol_type = other RNA
  modified_base 1: mod_base = OTHER; note = 2'-O-methyl-adenosine with phosphorothioate linkage
  modified_base 2: mod_base = OTHER; note = 2'-O-methyl-adenosine with phosphorothioate linkage
  modified_base 3: mod_base = OTHER; note = 2'-O-methyl-adenosine
  modified_base 4: mod_base = OTHER; note = 2'-O-methyl-uridine
  modified_base 5: mod_base = OTHER; note = 2'-O-methyl-guanosine
  modified_base 6: mod_base = OTHER; note = 2'-fluoro-uridine
  modified_base 7: mod_base = OTHER; note = 2'-O-methyl-cytidine
  modified_base 8: mod_base = OTHER; note = 2'-fluoro-cytidine
  modified_base 9: mod_base = OTHER; note = 2'-fluoro-uridine
  modified_base 10: mod_base = OTHER; note = 2'-fluoro-guanosine
  modified_base 11: mod_base = OTHER; note = 2'-fluoro-guanosine
  modified_base 12: mod_base = OTHER; note = 2'-O-methyl-adenosine
  modified_base 13: mod_base = OTHER; note = 2'-O-methyl-adenosine
  modified_base 14: mod_base = OTHER; note = 2'-O-methyl-guanosine
  modified_base 15: mod_base = OTHER; note = 2'-O-methyl-cytidine
  modified_base 16: mod_base = OTHER; note = 2'-O-methyl-adenosine
  modified_base 17: mod_base = OTHER; note = 2'-O-methyl-uridine
  modified_base 18: mod_base = OTHER; note = 2'-O-methyl-uridine with phosphorothioate linkage
  modified_base 19: mod_base = OTHER; note = 2'-O-methyl-guanosine with phosphorothioate linkage
  modified_base 20: mod_base = OTHER; note = 2'-O-methyl-adenosine
  modified_base 20: mod_base = OTHER; note = Nucleotide conjugated to 3 iterations of (2R,3R,4R,5S)-5-(3-(5-(((2R,3R,4R,5R,6R)- 3-acetamido-4,5-dihydroxy-6-(hydroxymethyl)tetrahydro-2H-py ran-2-yl)oxy) pentanamido)propyl)-2-((hydroxyl)methyl)-4-methoxytetrahydr ofuran-3-oxyl
aaatgtcctggaagcattga

SEQ ID NO: 1074 - RNA, 20 nt, synthetic construct
  source 1..20: mol_type = other RNA
  modified_base 1: mod_base = OTHER; note = 2'-O-methyl-adenosine with phosphorothioate linkage
  modified_base 2: mod_base = OTHER; note = 2'-O-methyl-cytidine with phosphorothioate linkage
  modified_base 3: mod_base = OTHER; note = 2'-O-methyl-adenosine
  modified_base 4: mod_base = OTHER; note = 2'-O-methyl-cytidine
  modified_base 5: mod_base = OTHER; note = 2'-O-methyl-cytidine
  modified_base 6: mod_base = OTHER; note = 2'-fluoro-adenosine
  modified_base 7: mod_base = OTHER; note = 2'-O-methyl-guanosine
  modified_base 8: mod_base = OTHER; note = 2'-fluoro-cytidine
  modified_base 9: mod_base = OTHER; note = 2'-fluoro-adenosine
  modified_base 10: mod_base = OTHER; note = 2'-fluoro-uridine
  modified_base 11: mod_base = OTHER; note = 2'-fluoro-adenosine
  modified_base 12: mod_base = OTHER; note = 2'-O-methyl-guanosine
  modified_base 13: mod_base = OTHER; note = 2'-O-methyl-uridine
  modified_base 14: mod_base = OTHER; note = 2'-O-methyl-cytidine
  modified_base 15: mod_base = OTHER; note = 2'-O-methyl-guanosine
  modified_base 16: mod_base = OTHER; note = 2'-O-methyl-guanosine
  modified_base 17: mod_base = OTHER; note = 2'-O-methyl-adenosine
  modified_base 18: mod_base = OTHER; note = 2'-O-methyl-cytidine with phosphorothioate linkage
  modified_base 19: mod_base = OTHER; note = 2'-O-methyl-cytidine with phosphorothioate linkage
  modified_base 20: mod_base = OTHER; note = 2'-O-methyl-adenosine
  modified_base 20: mod_base = OTHER; note = Nucleotide conjugated to 3 iterations of (2R,3R,4R,5S)-5-(3-(5-(((2R,3R,4R,5R,6R)- 3-acetamido-4,5-dihydroxy-6-(hydroxymethyl)tetrahydro-2H-py ran-2-yl)oxy) pentanamido)propyl)-2-((hydroxyl)methyl)-4-methoxytetrahydr ofuran-3-oxyl
acaccagcatagtcggacca

SEQ ID NO: 1075 - RNA, 20 nt, synthetic construct
  source 1..20: mol_type = other RNA
  modified_base 1: mod_base = OTHER; note = 2'-O-methyl-uridine with phosphorothioate linkage
  modified_base 2: mod_base = OTHER; note = 2'-O-methyl-guanosine with phosphorothioate linkage
  modified_base 3: mod_base = OTHER; note = 2'-O-methyl-uridine
  modified_base 4: mod_base = OTHER; note = 2'-O-methyl-cytidine
  modified_base 5: mod_base = OTHER; note = 2'-O-methyl-cytidine
  modified_base 6: mod_base = OTHER; note = 2'-fluoro-uridine
  modified_base 7: mod_base = OTHER; note = 2'-O-methyl-guanosine
  modified_base 8: mod_base = OTHER; note = 2'-fluoro-guanosine
  modified_base 9: mod_base = OTHER; note = 2'-fluoro-adenosine
  modified_base 10: mod_base = OTHER; note = 2'-fluoro-adenosine
  modified_base 11: mod_base = OTHER; note = 2'-fluoro-guanosine
  modified_base 12: mod_base = OTHER; note = 2'-O-methyl-cytidine
  modified_base 13: mod_base = OTHER; note = 2'-O-methyl-adenosine
  modified_base 14: mod_base = OTHER; note = 2'-O-methyl-uridine
  modified_base 15: mod_base = OTHER; note = 2'-O-methyl-uridine
  modified_base 16: mod_base = OTHER; note = 2'-O-methyl-guanosine
  modified_base 17: mod_base = OTHER; note = 2'-O-methyl-uridine
  modified_base 18: mod_base = OTHER; note = 2'-O-methyl-adenosine with phosphorothioate linkage
  modified_base 19: mod_base = OTHER; note = 2'-O-methyl-guanosine with phosphorothioate linkage
  modified_base 20: mod_base = OTHER; note = 2'-O-methyl-adenosine
  modified_base 20: mod_base = OTHER; note = Nucleotide conjugated to 3 iterations of (2R,3R,4R,5S)-5-(3-(5-(((2R,3R,4R,5R,6R)- 3-acetamido-4,5-dihydroxy-6-(hydroxymethyl)tetrahydro-2H-py ran-2-yl)oxy) pentanamido)propyl)-2-((hydroxyl)methyl)-4-methoxytetrahydr ofuran-3-oxyl
tgtcctggaagcattgtaga

SEQ ID NO: 1076 - RNA, 20 nt, synthetic construct
  source 1..20: mol_type = other RNA
  modified_base 1: mod_base = OTHER; note = 2'-O-methyl-adenosine with phosphorothioate linkage
  modified_base 2: mod_base = OTHER; note = 2'-O-methyl-uridine with phosphorothioate linkage
  modified_base 3: mod_base = OTHER; note = 2'-O-methyl-guanosine
  modified_base 4: mod_base = OTHER; note = 2'-O-methyl-adenosine
  modified_base 5: mod_base = OTHER; note = 2'-O-methyl-cytidine
  modified_base 6: mod_base = OTHER; note = 2'-fluoro-adenosine
  modified_base 7: mod_base = OTHER; note = 2'-O-methyl-cytidine
  modified_base 8: mod_base = OTHER; note = 2'-fluoro-cytidine
  modified_base 9: mod_base = OTHER; note = 2'-fluoro-adenosine
  modified_base 10: mod_base = OTHER; note = 2'-fluoro-cytidine
  modified_base 11: mod_base = OTHER; note = 2'-fluoro-adenosine
  modified_base 12: mod_base = OTHER; note = 2'-O-methyl-cytidine
  modified_base 13: mod_base = OTHER; note = 2'-O-methyl-uridine
  modified_base 14: mod_base = OTHER; note = 2'-O-methyl-guanosine
  modified_base 15: mod_base = OTHER; note = 2'-O-methyl-guanosine
  modified_base 16: mod_base = OTHER; note = 2'-O-methyl-cytidine
  modified_base 17: mod_base = OTHER; note = 2'-O-methyl-adenosine
  modified_base 18: mod_base = OTHER; note = 2'-O-methyl-uridine with phosphorothioate linkage
  modified_base 19: mod_base = OTHER; note = 2'-O-methyl-cytidine with phosphorothioate linkage
  modified_base 20: mod_base = OTHER; note = 2'-O-methyl-adenosine
  modified_base 20: mod_base = OTHER; note = Nucleotide conjugated to 3 iterations of (2R,3R,4R,5S)-5-(3-(5-(((2R,3R,4R,5R,6R)- 3-acetamido-4,5-dihydroxy-6-(hydroxymethyl)tetrahydro-2H-py ran-2-yl)oxy) pentanamido)propyl)-2-((hydroxyl)methyl)-4-methoxytetrahydr ofuran-3-oxyl
atgacaccacactggcatca

SEQ ID NO: 1077 - RNA, 20 nt, synthetic construct
  source 1..20: mol_type = other RNA
  modified_base 1: mod_base = OTHER; note = 2'-O-methyl-cytidine with phosphorothioate linkage
  modified_base 2: mod_base = OTHER; note = 2'-O-methyl-uridine with phosphorothioate linkage
  modified_base 3: mod_base = OTHER; note = 2'-O-methyl-uridine
  modified_base 4: mod_base = OTHER; note = 2'-O-methyl-guanosine
  modified_base 5: mod_base = OTHER; note = 2'-O-methyl-guanosine
  modified_base 6: mod_base = OTHER; note = 2'-fluoro-uridine
  modified_base 7: mod_base = OTHER; note = 2'-O-methyl-guanosine
  modified_base 8: mod_base = OTHER; note = 2'-fluoro-uridine
  modified_base 9: mod_base = OTHER; note = 2'-fluoro-uridine
  modified_base 10: mod_base = OTHER; note = 2'-fluoro-uridine
  modified_base 11: mod_base = OTHER; note = 2'-fluoro-uridine
  modified_base 12: mod_base = OTHER; note = 2'-O-methyl-adenosine
  modified_base 13: mod_base = OTHER; note = 2'-O-methyl-cytidine
  modified_base 14: mod_base = OTHER; note = 2'-O-methyl-cytidine
  modified_base 15: mod_base = OTHER; note = 2'-O-methyl-adenosine
  modified_base 16: mod_base = OTHER; note = 2'-O-methyl-uridine
  modified_base 17: mod_base = OTHER; note = 2'-O-methyl-guanosine
  modified_base 18: mod_base = OTHER; note = 2'-O-methyl-guanosine with phosphorothioate linkage
  modified_base 19: mod_base = OTHER; note = 2'-O-methyl-adenosine with phosphorothioate linkage
  modified_base 20: mod_base = OTHER; note = 2'-O-methyl-adenosine
  modified_base 20: mod_base = OTHER; note = Nucleotide conjugated to 3 iterations of (2R,3R,4R,5S)-5-(3-(5-(((2R,3R,4R,5R,6R)- 3-acetamido-4,5-dihydroxy-6-(hydroxymethyl)tetrahydro-2H-py ran-2-yl)oxy) pentanamido)propyl)-2-((hydroxyl)methyl)-4-methoxytetrahydr ofuran-3-oxyl
cttggtgttttaccatggaa

SEQ ID NO: 1078 - RNA, 20 nt, synthetic construct
  source 1..20: mol_type = other RNA
  modified_base 1: mod_base = OTHER; note = 2'-O-methyl-adenosine with phosphorothioate linkage
  modified_base 2: mod_base = OTHER; note = 2'-O-methyl-cytidine with phosphorothioate linkage
  modified_base 3: mod_base = OTHER; note = 2'-O-methyl-guanosine
  modified_base 4: mod_base = OTHER; note = 2'-O-methyl-adenosine
  modified_base 5: mod_base = OTHER; note = 2'-O-methyl-uridine
  modified_base 6: mod_base = OTHER; note = 2'-fluoro-guanosine
  modified_base 7: mod_base = OTHER; note = 2'-O-methyl-cytidine
  modified_base 8: mod_base = OTHER; note = 2'-fluoro-uridine
  modified_base 9: mod_base = OTHER; note = 2'-fluoro-cytidine
  modified_base 10: mod_base = OTHER; note = 2'-fluoro-adenosine
  modified_base 11: mod_base = OTHER; note = 2'-fluoro-guanosine
  modified_base 12: mod_base = OTHER; note = 2'-O-methyl-adenosine
  modified_base 13: mod_base = OTHER; note = 2'-O-methyl-uridine
  modified_base 14: mod_base = OTHER; note = 2'-O-methyl-guanosine
  modified_base 15: mod_base = OTHER; note = 2'-O-methyl-cytidine
  modified_base 16: mod_base = OTHER; note = 2'-O-methyl-adenosine
  modified_base 17: mod_base = OTHER; note = 2'-O-methyl-guanosine
  modified_base 18: mod_base = OTHER; note = 2'-O-methyl-adenosine with phosphorothioate linkage
  modified_base 19: mod_base = OTHER; note = 2'-O-methyl-adenosine with phosphorothioate linkage
  modified_base 20: mod_base = OTHER; note = 2'-O-methyl-adenosine
  modified_base 20: mod_base = OTHER; note = Nucleotide conjugated to 3 iterations of (2R,3R,4R,5S)-5-(3-(5-(((2R,3R,4R,5R,6R)- 3-acetamido-4,5-dihydroxy-6-(hydroxymethyl)tetrahydro-2H-py ran-2-yl)oxy) pentanamido)propyl)-2-((hydroxyl)methyl)-4-methoxytetrahydr ofuran-3-oxyl
acgatgctcagatgcagaaa

SEQ ID NO: 1079 - RNA, 20 nt, synthetic construct
  source 1..20: mol_type = other RNA
  modified_base 1: mod_base = OTHER; note = 2'-O-methyl-adenosine with phosphorothioate linkage
  modified_base 2: mod_base = OTHER; note = 2'-O-methyl-adenosine with phosphorothioate linkage
  modified_base 3: mod_base = OTHER; note = 2'-O-methyl-guanosine
  modified_base 4: mod_base = OTHER; note = 2'-O-methyl-cytidine
  modified_base 5: mod_base = OTHER; note = 2'-O-methyl-cytidine
  modified_base 6: mod_base = OTHER; note = 2'-fluoro-adenosine
  modified_base 7: mod_base = OTHER; note = 2'-O-methyl-uridine
  modified_base 8: mod_base = OTHER; note = 2'-fluoro-guanosine
  modified_base 9: mod_base = OTHER; note = 2'-fluoro-uridine
  modified_base 10: mod_base = OTHER; note = 2'-fluoro-guanosine
  modified_base 11: mod_base = OTHER; note = 2'-fluoro-guanosine
  modified_base 12: mod_base = OTHER; note = 2'-O-methyl-uridine
  modified_base 13: mod_base = OTHER; note = 2'-O-methyl-cytidine
  modified_base 14: mod_base = OTHER; note = 2'-O-methyl-cytidine
  modified_base 15: mod_base = OTHER; note = 2'-O-methyl-adenosine
  modified_base 16: mod_base = OTHER; note = 2'-O-methyl-guanosine
  modified_base 17: mod_base = OTHER; note = 2'-O-methyl-guanosine
  modified_base 18: mod_base = OTHER; note = 2'-O-methyl-adenosine with phosphorothioate linkage
  modified_base 19: mod_base = OTHER; note = 2'-O-methyl-uridine with phosphorothioate linkage
  modified_base 20: mod_base = OTHER; note = 2'-O-methyl-adenosine
  modified_base 20: mod_base = OTHER; note = Nucleotide conjugated to 3 iterations of (2R,3R,4R,5S)-5-(3-(5-(((2R,3R,4R,5R,6R)- 3-acetamido-4,5-dihydroxy-6-(hydroxymethyl)tetrahydro-2H-py ran-2-yl)oxy) pentanamido)propyl)-2-((hydroxyl)methyl)-4-methoxytetrahydr ofuran-3-oxyl
aagccatgtggtccaggata

SEQ ID NO: 1080 - RNA, 20 nt, synthetic construct
  source 1..20: mol_type = other RNA
  modified_base 1: mod_base = OTHER; note = 2'-O-methyl-adenosine with phosphorothioate linkage
  modified_base 2: mod_base = OTHER; note = 2'-O-methyl-guanosine with phosphorothioate linkage
  modified_base 3: mod_base = OTHER; note = 2'-O-methyl-uridine
  modified_base 4: mod_base = OTHER; note = 2'-O-methyl-adenosine
  modified_base 5: mod_base = OTHER; note = 2'-O-methyl-cytidine
  modified_base 6: mod_base = OTHER; note = 2'-fluoro-uridine
  modified_base 7: mod_base = OTHER; note = 2'-O-methyl-guanosine
  modified_base 8: mod_base = OTHER; note = 2'-fluoro-cytidine
  modified_base 9: mod_base = OTHER; note = 2'-fluoro-adenosine
  modified_base 10: mod_base = OTHER; note = 2'-fluoro-adenosine
  modified_base 11: mod_base = OTHER; note = 2'-fluoro-cytidine
  modified_base 12: mod_base = OTHER; note = 2'-O-methyl-cytidine
  modified_base 13: mod_base = OTHER; note = 2'-O-methyl-uridine
  modified_base 14: mod_base = OTHER; note = 2'-O-methyl-guanosine
  modified_base 15: mod_base = OTHER; note = 2'-O-methyl-adenosine
  modified_base 16: mod_base = OTHER; note = 2'-O-methyl-cytidine
  modified_base 17: mod_base = OTHER; note = 2'-O-methyl-guanosine
  modified_base 18: mod_base = OTHER; note = 2'-O-methyl-cytidine with phosphorothioate linkage
  modified_base 19: mod_base = OTHER; note = 2'-O-methyl-guanosine with phosphorothioate linkage
  modified_base 20: mod_base = OTHER; note = 2'-O-methyl-adenosine
  modified_base 20: mod_base = OTHER; note = Nucleotide conjugated to 3 iterations of (2R,3R,4R,5S)-5-(3-(5-(((2R,3R,4R,5R,6R)- 3-acetamido-4,5-dihydroxy-6-(hydroxymethyl)tetrahydro-2H-py ran-2-yl)oxy) pentanamido)propyl)-2-((hydroxyl)methyl)-4-methoxytetrahydr ofuran-3-oxyl
agtactgcaacctgacgcga

SEQ ID NO: 1081 - RNA, 20 nt, synthetic construct
  source 1..20: mol_type = other RNA
  modified_base 1: mod_base = OTHER; note = 2'-O-methyl-adenosine with phosphorothioate linkage
  modified_base 2: mod_base = OTHER; note = 2'-O-methyl-adenosine with phosphorothioate linkage
  modified_base 3: mod_base = OTHER; note = 2'-O-methyl-cytidine
  modified_base 4: mod_base = OTHER; note = 2'-O-methyl-uridine
  modified_base 5: mod_base = OTHER; note = 2'-O-methyl-adenosine
  modified_base 6: mod_base = OTHER; note = 2'-fluoro-cytidine
  modified_base 7: mod_base = OTHER; note = 2'-O-methyl-uridine
  modified_base 8: mod_base = OTHER; note = 2'-fluoro-guanosine
  modified_base 9: mod_base = OTHER; note = 2'-fluoro-cytidine
  modified_base 10: mod_base = OTHER; note = 2'-fluoro-adenosine
  modified_base 11: mod_base = OTHER; note = 2'-fluoro-guanosine
  modified_base 12: mod_base = OTHER; note = 2'-O-methyl-guanosine
  modified_base 13: mod_base = OTHER; note = 2'-O-methyl-adenosine
  modified_base 14: mod_base = OTHER; note = 2'-O-methyl-adenosine
  modified_base 15: mod_base = OTHER; note = 2'-O-methyl-uridine
  modified_base 16: mod_base = OTHER; note = 2'-O-methyl-cytidine
  modified_base 17: mod_base = OTHER; note = 2'-O-methyl-cytidine
  modified_base 18: mod_base = OTHER; note = 2'-O-methyl-adenosine with phosphorothioate linkage
  modified_base 19: mod_base = OTHER; note = 2'-O-methyl-guanosine with phosphorothioate linkage
  modified_base 20: mod_base = OTHER; note = 2'-O-methyl-adenosine
  modified_base 20: mod_base = OTHER; note = Nucleotide conjugated to 3 iterations of (2R,3R,4R,5S)-5-(3-(5-(((2R,3R,4R,5R,6R)- 3-acetamido-4,5-dihydroxy-6-(hydroxymethyl)tetrahydro-2H-py ran-2-yl)oxy) pentanamido)propyl)-2-((hydroxyl)methyl)-4-methoxytetrahydr ofuran-3-oxyl
aactactgcaggaatccaga

SEQ ID NO: 1082 - RNA, 20 nt, synthetic construct
  source 1..20: mol_type = other RNA
  modified_base 1: mod_base = OTHER; note = 2'-O-methyl-cytidine with phosphorothioate linkage
  modified_base 2: mod_base = OTHER; note = 2'-O-methyl-uridine with phosphorothioate linkage
  modified_base 3: mod_base = OTHER; note = 2'-O-methyl-guanosine
  modified_base 4: mod_base = OTHER; note = 2'-O-methyl-cytidine
  modified_base 5: mod_base = OTHER; note = 2'-O-methyl-adenosine
  modified_base 6: mod_base = OTHER; note = 2'-fluoro-adenosine
  modified_base 7: mod_base = OTHER; note = 2'-O-methyl-cytidine
  modified_base 8: mod_base = OTHER; note = 2'-fluoro-cytidine
  modified_base 9: mod_base = OTHER; note = 2'-fluoro-uridine
  modified_base 10: mod_base = OTHER; note = 2'-fluoro-guanosine
  modified_base 11: mod_base = OTHER; note = 2'-fluoro-adenosine
  modified_base 12: mod_base = OTHER; note = 2'-O-methyl-cytidine
  modified_base 13: mod_base = OTHER; note = 2'-O-methyl-guanosine
  modified_base 14: mod_base = OTHER; note = 2'-O-methyl-cytidine
  modified_base 15: mod_base = OTHER; note = 2'-O-methyl-guanosine
  modified_base 16: mod_base = OTHER; note = 2'-O-methyl-adenosine
  modified_base 17: mod_base = OTHER; note = 2'-O-methyl-uridine
  modified_base 18: mod_base = OTHER; note = 2'-O-methyl-guanosine with phosphorothioate linkage
  modified_base 19: mod_base = OTHER; note = 2'-O-methyl-cytidine with phosphorothioate linkage
  modified_base 20: mod_base = OTHER; note = 2'-O-methyl-adenosine
  modified_base 20: mod_base = OTHER; note = Nucleotide conjugated to 3 iterations of (2R,3R,4R,5S)-5-(3-(5-(((2R,3R,4R,5R,6R)- 3-acetamido-4,5-dihydroxy-6-(hydroxymethyl)tetrahydro-2H-py ran-2-yl)oxy) pentanamido)propyl)-2-((hydroxyl)methyl)-4-methoxytetrahydr ofuran-3-oxyl
ctgcaacctgacgcgatgca

SEQ ID NO: 1083 - RNA, 20 nt, synthetic construct
  source 1..20: mol_type = other RNA
  modified_base 1: mod_base = OTHER; note = 2'-O-methyl-guanosine with phosphorothioate linkage
  modified_base 2: mod_base = OTHER; note = 2'-O-methyl-cytidine with phosphorothioate linkage
  modified_base 3: mod_base = OTHER; note = 2'-O-methyl-adenosine
  modified_base 4: mod_base = OTHER; note = 2'-O-methyl-uridine
  modified_base 5: mod_base = OTHER; note = 2'-O-methyl-cytidine
  modified_base 6: mod_base = OTHER; note = 2'-fluoro-adenosine
  modified_base 7: mod_base = OTHER; note = 2'-O-methyl-guanosine
  modified_base 8: mod_base = OTHER; note = 2'-fluoro-adenosine
  modified_base 9: mod_base = OTHER; note = 2'-fluoro-guanosine
  modified_base 10: mod_base = OTHER; note = 2'-fluoro-guanosine
  modified_base 11: mod_base = OTHER; note = 2'-fluoro-adenosine
  modified_base 12: mod_base = OTHER; note = 2'-O-methyl-cytidine
  modified_base 13: mod_base = OTHER; note = 2'-O-methyl-cytidine
  modified_base 14: mod_base = OTHER; note = 2'-O-methyl-cytidine
  modified_base 15: mod_base = OTHER; note = 2'-O-methyl-cytidine
  modified_base 16: mod_base = OTHER; note = 2'-O-methyl-adenosine
  modified_base 17: mod_base = OTHER; note = 2'-O-methyl-guanosine
  modified_base 18: mod_base = OTHER; note = 2'-O-methyl-adenosine with phosphorothioate linkage
  modified_base 19: mod_base = OTHER; note = 2'-O-methyl-adenosine with phosphorothioate linkage
  modified_base 20: mod_base = OTHER; note = 2'-O-methyl-adenosine
  modified_base 20: mod_base = OTHER; note = Nucleotide conjugated to 3 iterations of (2R,3R,4R,5S)-5-(3-(5-(((2R,3R,4R,5R,6R)- 3-acetamido-4,5-dihydroxy-6-(hydroxymethyl)tetrahydro-2H-py ran-2-yl)oxy) pentanamido)propyl)-2-((hydroxyl)methyl)-4-methoxytetrahydr ofuran-3-oxyl
gcatcagaggaccccagaaa

SEQ ID NO: 1084 - RNA, 20 nt, synthetic construct
  source 1..20: mol_type = other RNA
  modified_base 1: mod_base = OTHER; note = 2'-O-methyl-adenosine with phosphorothioate linkage
  modified_base 2: mod_base = OTHER; note = 2'-O-methyl-guanosine with phosphorothioate linkage
  modified_base 3: mod_base = OTHER; note = 2'-O-methyl-adenosine
  modified_base 4: mod_base = OTHER; note = 2'-O-methyl-adenosine
  modified_base 5: mod_base = OTHER; note = 2'-O-methyl-adenosine
  modified_base 6: mod_base = OTHER; note = 2'-fluoro-cytidine
  modified_base 7: mod_base = OTHER; note = 2'-O-methyl-adenosine
  modified_base 8: mod_base = OTHER; note = 2'-fluoro-guanosine
  modified_base 9: mod_base = OTHER; note = 2'-fluoro-adenosine
  modified_base 10: mod_base = OTHER; note = 2'-fluoro-adenosine
  modified_base 11: mod_base = OTHER; note = 2'-fluoro-uridine
  modified_base 12: mod_base = OTHER; note = 2'-O-methyl-cytidine
  modified_base 13: mod_base = OTHER; note = 2'-O-methyl-adenosine
  modified_base 14: mod_base = OTHER; note = 2'-O-methyl-guanosine
  modified_base 15: mod_base = OTHER; note = 2'-O-methyl-guanosine
  modified_base 16: mod_base = OTHER; note = 2'-O-methyl-uridine
  modified_base 17: mod_base = OTHER; note = 2'-O-methyl-guanosine
  modified_base 18: mod_base = OTHER; note = 2'-O-methyl-uridine with phosphorothioate linkage
  modified_base 19: mod_base = OTHER; note = 2'-O-methyl-cytidine with phosphorothioate linkage
  modified_base 20: mod_base = OTHER; note = 2'-O-methyl-adenosine
  modified_base 20: mod_base = OTHER; note = Nucleotide conjugated to 3 iterations of (2R,3R,4R,5S)-5-(3-(5-(((2R,3R,4R,5R,6R)- 3-acetamido-4,5-dihydroxy-6-(hydroxymethyl)tetrahydro-2H-py ran-2-yl)oxy) pentanamido)propyl)-2-((hydroxyl)methyl)-4-methoxytetrahydr ofuran-3-oxyl
agaaacagaatcaggtgtca

SEQ ID NO: 1085 - RNA, 20 nt, synthetic construct
  source 1..20: mol_type = other RNA
  modified_base 1: mod_base = OTHER; note = 2'-O-methyl-cytidine with phosphorothioate linkage
  modified_base 2: mod_base = OTHER; note = 2'-O-methyl-adenosine with phosphorothioate linkage
  modified_base 3: mod_base = OTHER; note = 2'-O-methyl-guanosine
  modified_base 4: mod_base = OTHER; note = 2'-O-methyl-adenosine
  modified_base 5: mod_base = OTHER; note = 2'-O-methyl-cytidine
  modified_base 6: mod_base = OTHER; note = 2'-fluoro-adenosine
  modified_base 7: mod_base = OTHER; note = 2'-O-methyl-cytidine
  modified_base 8: mod_base = OTHER; note = 2'-fluoro-adenosine
  modified_base 9: mod_base = OTHER; note = 2'-fluoro-guanosine
  modified_base 10: mod_base = OTHER; note = 2'-fluoro-adenosine
  modified_base 11: mod_base = OTHER; note = 2'-fluoro-adenosine
  modified_base 12: mod_base = OTHER; note = 2'-O-methyl-guanosine
  modified_base 13: mod_base = OTHER; note = 2'-O-methyl-guanosine
  modified_base 14: mod_base = OTHER; note = 2'-O-methyl-guanosine
  modified_base 15: mod_base = OTHER; note = 2'-O-methyl-adenosine
  modified_base 16: mod_base = OTHER; note = 2'-O-methyl-cytidine
  modified_base 17: mod_base = OTHER; note = 2'-O-methyl-uridine
  modified_base 18: mod_base = OTHER; note = 2'-O-methyl-guanosine with phosphorothioate linkage
  modified_base 19: mod_base = OTHER; note = 2'-O-methyl-uridine with phosphorothioate linkage
  modified_base 20: mod_base = OTHER; note = 2'-O-methyl-adenosine
  modified_base 20: mod_base = OTHER; note = Nucleotide conjugated to 3 iterations of (2R,3R,4R,5S)-5-(3-(5-(((2R,3R,4R,5R,6R)- 3-acetamido-4,5-dihydroxy-6-(hydroxymethyl)tetrahydro-2H-py ran-2-yl)oxy) pentanamido)propyl)-2-((hydroxyl)methyl)-4-methoxytetrahydr ofuran-3-oxyl
cagacacagaagggactgta

SEQ ID NO: 1086 - RNA, 20 nt, synthetic construct
  source 1..20: mol_type = other RNA
  modified_base 1: mod_base = OTHER; note = 2'-O-methyl-uridine with phosphorothioate linkage
  modified_base 2: mod_base = OTHER; note = 2'-O-methyl-adenosine with phosphorothioate linkage
  modified_base 3: mod_base = OTHER; note = 2'-O-methyl-guanosine
  modified_base 4: mod_base = OTHER; note = 2'-O-methyl-adenosine
  modified_base 5: mod_base = OTHER; note = 2'-O-methyl-guanosine
  modified_base 6: mod_base = OTHER; note = 2'-fluoro-guanosine
  modified_base 7: mod_base = OTHER; note = 2'-O-methyl-cytidine
  modified_base 8: mod_base = OTHER; note = 2'-fluoro-uridine
  modified_base 9: mod_base = OTHER; note = 2'-fluoro-cytidine
  modified_base 10: mod_base = OTHER; note = 2'-fluoro-cytidine
  modified_base 11: mod_base = OTHER; note = 2'-fluoro-uridine
  modified_base 12: mod_base = OTHER; note = 2'-O-methyl-uridine
  modified_base 13: mod_base = OTHER; note = 2'-O-methyl-cytidine
  modified_base 14: mod_base = OTHER; note = 2'-O-methyl-uridine
  modified_base 15: mod_base = OTHER; note = 2'-O-methyl-guanosine
  modified_base 16: mod_base = OTHER; note = 2'-O-methyl-adenosine
  modified_base 17: mod_base = OTHER; note = 2'-O-methyl-adenosine
  modified_base 18: mod_base = OTHER; note = 2'-O-methyl-cytidine with phosphorothioate linkage
  modified_base 19: mod_base = OTHER; note = 2'-O-methyl-adenosine with phosphorothioate linkage
  modified_base 20: mod_base = OTHER; note = 2'-O-methyl-adenosine
  modified_base 20: mod_base = OTHER; note = Nucleotide conjugated to 3 iterations of (2R,3R,4R,5S)-5-(3-(5-(((2R,3R,4R,5R,6R)- 3-acetamido-4,5-dihydroxy-6-(hydroxymethyl)tetrahydro-2H-py ran-2-yl)oxy) pentanamido)propyl)-2-((hydroxyl)methyl)-4-methoxytetrahydr ofuran-3-oxyl
tagaggctccttctgaacaa

SEQ ID NO: 1087 - RNA, 20 nt, synthetic construct
  source 1..20: mol_type = other RNA
  modified_base 1: mod_base = OTHER; note = 2'-O-methyl-guanosine with phosphorothioate linkage
  modified_base 2: mod_base = OTHER; note = 2'-O-methyl-guanosine with phosphorothioate linkage
  modified_base 3: mod_base = OTHER; note = 2'-O-methyl-cytidine
  modified_base 4: mod_base = OTHER; note = 2'-O-methyl-cytidine
  modified_base 5: mod_base = OTHER; note = 2'-O-methyl-uridine
  modified_base 6: mod_base = OTHER; note = 2'-fluoro-guanosine
  modified_base 7: mod_base = OTHER; note = 2'-O-methyl-guanosine
  modified_base 8: mod_base = OTHER; note = 2'-fluoro-guanosine
  modified_base 9: mod_base = OTHER; note = 2'-fluoro-guanosine
  modified_base 10: mod_base = OTHER; note = 2'-fluoro-uridine
  modified_base 11: mod_base = OTHER; note = 2'-fluoro-guanosine
  modified_base 12: mod_base = OTHER; note = 2'-O-methyl-cytidine
  modified_base 13: mod_base = OTHER; note = 2'-O-methyl-adenosine
  modified_base 14: mod_base = OTHER; note = 2'-O-methyl-guanosine
  modified_base 15: mod_base = OTHER; note = 2'-O-methyl-guanosine
  modified_base 16: mod_base = OTHER; note = 2'-O-methyl-adenosine
  modified_base 17: mod_base = OTHER; note = 2'-O-methyl-guanosine
  modified_base 18: mod_base = OTHER; note = 2'-O-methyl-uridine with phosphorothioate linkage
  modified_base 19: mod_base = OTHER; note = 2'-O-methyl-guanosine with phosphorothioate linkage
  modified_base 20: mod_base = OTHER; note = 2'-O-methyl-adenosine
  modified_base 20: mod_base = OTHER; note = Nucleotide conjugated to 3 iterations of (2R,3R,4R,5S)-5-(3-(5-(((2R,3R,4R,5R,6R)- 3-acetamido-4,5-dihydroxy-6-(hydroxymethyl)tetrahydro-2H-py ran-2-yl)oxy) pentanamido)propyl)-2-((hydroxyl)methyl)-4-methoxytetrahydr ofuran-3-oxyl
ggcctggggtgcaggagtga

SEQ ID NO: 1088 - RNA, 20 nt, synthetic construct
  source 1..20: mol_type = other RNA
  modified_base 1: mod_base = OTHER; note = 2'-O-methyl-guanosine with phosphorothioate linkage
  modified_base 2: mod_base = OTHER; note = 2'-O-methyl-uridine with phosphorothioate linkage
  modified_base 3: mod_base = OTHER; note = 2'-O-methyl-cytidine
  modified_base 4: mod_base = OTHER; note = 2'-O-methyl-adenosine
  modified_base 5: mod_base = OTHER; note = 2'-O-methyl-adenosine
  modified_base 6: mod_base = OTHER; note = 2'-fluoro-uridine
  modified_base 7: mod_base = OTHER; note = 2'-O-methyl-cytidine
  modified_base 8: mod_base = OTHER; note = 2'-fluoro-uridine
  modified_base 9: mod_base = OTHER; note = 2'-fluoro-uridine
  modified_base 10: mod_base = OTHER; note = 2'-fluoro-guanosine
  modified_base 11: mod_base = OTHER; note = 2'-fluoro-guanosine
  modified_base 12: mod_base = OTHER; note = 2'-O-methyl-uridine
  modified_base 13: mod_base = OTHER; note = 2'-O-methyl-cytidine
  modified_base 14: mod_base = OTHER; note = 2'-O-methyl-adenosine
  modified_base 15: mod_base = OTHER; note = 2'-O-methyl-uridine
  modified_base 16: mod_base = OTHER; note = 2'-O-methyl-cytidine
  modified_base 17: mod_base = OTHER; note = 2'-O-methyl-uridine
  modified_base 18: mod_base = OTHER; note = 2'-O-methyl-adenosine with phosphorothioate linkage
  modified_base 19: mod_base = OTHER; note = 2'-O-methyl-uridine with phosphorothioate linkage
  modified_base 20: mod_base = OTHER; note = 2'-O-methyl-adenosine
  modified_base 20: mod_base = OTHER; note = Nucleotide conjugated to 3 iterations of (2R,3R,4R,5S)-5-(3-(5-(((2R,3R,4R,5R,6R)- 3-acetamido-4,5-dihydroxy-6-(hydroxymethyl)tetrahydro-2H-py ran-2-yl)oxy) pentanamido)propyl)-2-((hydroxyl)methyl)-4-methoxytetrahydr ofuran-3-oxyl
gtcaatcttggtcatctata

SEQ ID NO: 1089 - RNA, 20 nt, synthetic construct
  source 1..20: mol_type = other RNA
  modified_base 1: mod_base = OTHER; note = 2'-O-methyl-adenosine with phosphorothioate linkage
  modified_base 2: mod_base = OTHER; note = 2'-O-methyl-uridine with phosphorothioate linkage
  modified_base 3: mod_base = OTHER; note = 2'-O-methyl-uridine
  modified_base 4: mod_base = OTHER; note = 2'-O-methyl-cytidine
  modified_base 5: mod_base = OTHER; note = 2'-O-methyl-uridine
  modified_base 6: mod_base = OTHER; note = 2'-fluoro-cytidine
  modified_base 7: mod_base = OTHER; note = 2'-O-methyl-cytidine
  modified_base 8: mod_base = OTHER; note = 2'-fluoro-adenosine
  modified_base 9: mod_base = OTHER; note = 2'-fluoro-cytidine
  modified_base 10: mod_base = OTHER; note = 2'-fluoro-cytidine
  modified_base 11: mod_base = OTHER; note = 2'-fluoro-adenosine
  modified_base 12: mod_base = OTHER; note = 2'-O-methyl-cytidine
  modified_base 13: mod_base = OTHER; note = 2'-O-methyl-uridine
  modified_base 14: mod_base = OTHER; note = 2'-O-methyl-guanosine
  modified_base 15: mod_base = OTHER; note = 2'-O-methyl-uridine
  modified_base 16: mod_base = OTHER; note = 2'-O-methyl-cytidine
  modified_base 17: mod_base = OTHER; note = 2'-O-methyl-adenosine
  modified_base 18: mod_base = OTHER; note = 2'-O-methyl-cytidine with phosphorothioate linkage
  modified_base 19: mod_base = OTHER; note = 2'-O-methyl-adenosine with phosphorothioate linkage
  modified_base 20: mod_base = OTHER; note = 2'-O-methyl-adenosine
  modified_base 20: mod_base = OTHER; note = Nucleotide conjugated to 3 iterations of (2R,3R,4R,5S)-5-(3-(5-(((2R,3R,4R,5R,6R)- 3-acetamido-4,5-dihydroxy-6-(hydroxymethyl)tetrahydro-2H-py ran-2-yl)oxy) pentanamido)propyl)-2-((hydroxyl)methyl)-4-methoxytetrahydr ofuran-3-oxyl
attctccaccactgtcacaa

SEQ ID NO: 1090 - RNA, 20 nt, synthetic construct
  source 1..20: mol_type = other RNA
  modified_base 1: mod_base = OTHER; note = 2'-O-methyl-guanosine with phosphorothioate linkage
  modified_base 2: mod_base = OTHER; note = 2'-O-methyl-guanosine with phosphorothioate linkage
  modified_base 3: mod_base = OTHER; note = 2'-O-methyl-adenosine
  modified_base 4: mod_base = OTHER; note = 2'-O-methyl-guanosine
  modified_base 5: mod_base = OTHER; note = 2'-O-methyl-uridine
  modified_base 6: mod_base = OTHER; note = 2'-fluoro-adenosine
  modified_base 7: mod_base = OTHER; note = 2'-O-methyl-cytidine
  modified_base 8: mod_base = OTHER; note = 2'-fluoro-uridine
  modified_base 9: mod_base = OTHER; note = 2'-fluoro-guanosine
  modified_base 10: mod_base = OTHER; note = 2'-fluoro-cytidine
  modified_base 11: mod_base = OTHER; note = 2'-fluoro-adenosine
  modified_base 12: mod_base = OTHER; note = 2'-O-methyl-adenosine
  modified_base 13: mod_base = OTHER; note = 2'-O-methyl-cytidine
  modified_base 14: mod_base = OTHER; note = 2'-O-methyl-cytidine
  modified_base 15: mod_base = OTHER; note = 2'-O-methyl-uridine
  modified_base 16: mod_base = OTHER; note = 2'-O-methyl-guanosine
  modified_base 17: mod_base = OTHER; note = 2'-O-methyl-adenosine
  modified_base 18: mod_base = OTHER; note = 2'-O-methyl-cytidine with phosphorothioate linkage
  modified_base 19: mod_base = OTHER; note = 2'-O-methyl-adenosine with phosphorothioate linkage
  modified_base 20: mod_base = OTHER; note = 2'-O-methyl-adenosine
  modified_base 20: mod_base = OTHER; note = Nucleotide conjugated to 3 iterations of (2R,3R,4R,5S)-5-(3-(5-(((2R,3R,4R,5R,6R)- 3-acetamido-4,5-dihydroxy-6-(hydroxymethyl)tetrahydro-2H-py ran-2-yl)oxy) pentanamido)propyl)-2-((hydroxyl)methyl)-4-methoxytetrahydr ofuran-3-oxyl
ggagtactgcaacctgacaa

SEQ ID NO: 1091 - RNA, 20 nt, synthetic construct
  source 1..20: mol_type = other RNA
  modified_base 1: mod_base = OTHER; note = 2'-O-methyl-adenosine with phosphorothioate linkage
  modified_base 2: mod_base = OTHER; note = 2'-O-methyl-adenosine with phosphorothioate linkage
  modified_base 3: mod_base = OTHER; note = 2'-O-methyl-uridine
  modified_base 4: mod_base = OTHER; note = 2'-O-methyl-guanosine
  modified_base 5: mod_base = OTHER; note = 2'-O-methyl-uridine
  modified_base 6: mod_base = OTHER; note = 2'-fluoro-cytidine
  modified_base 7: mod_base = OTHER; note = 2'-O-methyl-cytidine
  modified_base 8: mod_base = OTHER; note = 2'-fluoro-adenosine
  modified_base 9: mod_base = OTHER; note = 2'-fluoro-guanosine
  modified_base 10: mod_base = OTHER; note = 2'-fluoro-uridine
  modified_base 11: mod_base = OTHER; note = 2'-fluoro-guanosine
  modified_base 12: mod_base = OTHER; note = 2'-O-methyl-adenosine
  modified_base 13: mod_base = OTHER; note = 2'-O-methyl-cytidine
  modified_base 14: mod_base = OTHER; note = 2'-O-methyl-adenosine
  modified_base 15: mod_base = OTHER; note = 2'-O-methyl-guanosine
  modified_base 16: mod_base = OTHER; note = 2'-O-methyl-adenosine
  modified_base 17: mod_base = OTHER; note = 2'-O-methyl-adenosine
  modified_base 18: mod_base = OTHER; note = 2'-O-methyl-uridine with phosphorothioate linkage
  modified_base 19: mod_base = OTHER; note = 2'-O-methyl-cytidine with phosphorothioate linkage
  modified_base 20: mod_base = OTHER; note = 2'-O-methyl-adenosine
  modified_base 20: mod_base = OTHER; note = Nucleotide conjugated to 3 iterations of (2R,3R,4R,5S)-5-(3-(5-(((2R,3R,4R,5R,6R)- 3-acetamido-4,5-dihydroxy-6-(hydroxymethyl)tetrahydro-2H-py ran-2-yl)oxy) pentanamido)propyl)-2-((hydroxyl)methyl)-4-methoxytetrahydr ofuran-3-oxyl
aatgtccagtgacagaatca

SEQ ID NO: 1092 - RNA, 20 nt, synthetic construct
  source 1..20: mol_type = other RNA
  modified_base 1: mod_base = OTHER; note = 2'-O-methyl-adenosine with phosphorothioate linkage
  modified_base 2: mod_base = OTHER; note = 2'-O-methyl-adenosine with phosphorothioate linkage
  modified_base 3: mod_base = OTHER; note = 2'-O-methyl-adenosine
  modified_base 4: mod_base = OTHER; note = 2'-O-methyl-guanosine
  modified_base 5: mod_base = OTHER; note = 2'-O-methyl-cytidine
  modified_base 6: mod_base = OTHER; note = 2'-fluoro-cytidine
  modified_base 7: mod_base = OTHER; note = 2'-O-methyl-adenosine
  modified_base 8: mod_base = OTHER; note = 2'-fluoro-uridine
  modified_base 9: mod_base = OTHER; note = 2'-fluoro-guanosine
  modified_base 10: mod_base = OTHER; note = 2'-fluoro-uridine
  modified_base 11: mod_base = OTHER; note = 2'-fluoro-guanosine
  modified_base 12: mod_base = OTHER; note = 2'-O-methyl-guanosine
  modified_base 13: mod_base = OTHER; note = 2'-O-methyl-uridine
  modified_base 14: mod_base = OTHER; note = 2'-O-methyl-cytidine
  modified_base 15: mod_base = OTHER; note = 2'-O-methyl-cytidine
  modified_base 16: mod_base = OTHER; note = 2'-O-methyl-adenosine
  modified_base 17: mod_base = OTHER; note = 2'-O-methyl-guanosine
  modified_base 18: mod_base = OTHER; note = 2'-O-methyl-guanosine with phosphorothioate linkage
  modified_base 19: mod_base = OTHER; note = 2'-O-methyl-adenosine with phosphorothioate linkage
  modified_base 20: mod_base = OTHER; note = 2'-O-methyl-adenosine
  modified_base 20: mod_base = OTHER; note = Nucleotide conjugated to 3 iterations of (2R,3R,4R,5S)-5-(3-(5-(((2R,3R,4R,5R,6R)- 3-acetamido-4,5-dihydroxy-6-(hydroxymethyl)tetrahydro-2H-py ran-2-yl)oxy) pentanamido)propyl)-2-((hydroxyl)methyl)-4-methoxytetrahydr ofuran-3-oxyl
aaagccatgtggtccaggaa

SEQ ID NO: 1093 - RNA, 20 nt, synthetic construct
  source 1..20: mol_type = other RNA
  modified_base 1: mod_base = OTHER; note = 2'-O-methyl-cytidine with phosphorothioate linkage
  modified_base 2: mod_base = OTHER; note = 2'-O-methyl-adenosine with phosphorothioate linkage
  modified_base 3: mod_base = OTHER; note = 2'-O-methyl-guanosine
  modified_base 4: mod_base = OTHER; note = 2'-O-methyl-adenosine
  modified_base 5: mod_base = OTHER; note = 2'-O-methyl-uridine
  modified_base 6: mod_base = OTHER; note = 2'-fluoro-adenosine
  modified_base 7: mod_base = OTHER; note = 2'-O-methyl-uridine
  modified_base 8: mod_base = OTHER; note = 2'-fluoro-uridine
  modified_base 9: mod_base = OTHER; note = 2'-fluoro-guanosine
  modified_base 10: mod_base = OTHER; note = 2'-fluoro-cytidine
  modified_base 11: mod_base = OTHER; note = 2'-fluoro-cytidine
  modified_base 12: mod_base = OTHER; note = 2'-O-methyl-uridine
  modified_base 13: mod_base = OTHER; note = 2'-O-methyl-uridine
  modified_base 14: mod_base = OTHER; note = 2'-O-methyl-guanosine
  modified_base 15: mod_base = OTHER; note = 2'-O-methyl-cytidine
  modified_base 16: mod_base = OTHER; note = 2'-O-methyl-uridine
  modified_base 17: mod_base = OTHER; note = 2'-O-methyl-adenosine
  modified_base 18: mod_base = OTHER; note = 2'-O-methyl-adenosine with phosphorothioate linkage
  modified_base 19: mod_base = OTHER; note = 2'-O-methyl-adenosine with phosphorothioate linkage
  modified_base 20: mod_base = OTHER; note = 2'-O-methyl-adenosine
  modified_base 20: mod_base = OTHER; note = Nucleotide conjugated to 3 iterations of (2R,3R,4R,5S)-5-(3-(5-(((2R,3R,4R,5R,6R)- 3-acetamido-4,5-dihydroxy-6-(hydroxymethyl)tetrahydro-2H-py ran-2-yl)oxy) pentanamido)propyl)-2-((hydroxyl)methyl)-4-methoxytetrahydr ofuran-3-oxyl
cagatattgccttgctaaaa

SEQ ID NO: 1094 - RNA, 20 nt, synthetic construct
  source 1..20: mol_type = other RNA
  modified_base 1: mod_base = OTHER; note = 2'-O-methyl-cytidine with phosphorothioate linkage
  modified_base 2: mod_base = OTHER; note = 2'-O-methyl-adenosine with phosphorothioate linkage
  modified_base 3: mod_base = OTHER; note = 2'-O-methyl-adenosine
  modified_base 4: mod_base = OTHER; note = 2'-O-methyl-adenosine
  modified_base 5: mod_base = OTHER; note = 2'-O-methyl-guanosine
  modified_base 6: mod_base = OTHER; note = 2'-fluoro-guanosine
  modified_base 7: mod_base = OTHER; note = 2'-O-methyl-cytidine
  modified_base 8: mod_base = OTHER; note = 2'-fluoro-cytidine
  modified_base 9: mod_base = OTHER; note = 2'-fluoro-uridine
  modified_base 10: mod_base = OTHER; note = 2'-fluoro-guanosine
  modified_base 11: mod_base = OTHER; note = 2'-fluoro-guanosine
  modified_base 12: mod_base = OTHER; note = 2'-O-methyl-guanosine
  modified_base 13: mod_base = OTHER; note = 2'-O-methyl-guanosine
  modified_base 14: mod_base = OTHER; note = 2'-O-methyl-uridine
  modified_base 15: mod_base = OTHER; note = 2'-O-methyl-guanosine
  modified_base 16: mod_base = OTHER; note = 2'-O-methyl-cytidine
  modified_base 17: mod_base = OTHER; note = 2'-O-methyl-adenosine
  modified_base 18: mod_base = OTHER; note = 2'-O-methyl-guanosine with phosphorothioate linkage
  modified_base 19: mod_base = OTHER; note = 2'-O-methyl-guanosine with phosphorothioate linkage
  modified_base 20: mod_base = OTHER; note = 2'-O-methyl-adenosine
  modified_base 20: mod_base = OTHER; note = Nucleotide conjugated to 3 iterations of (2R,3R,4R,5S)-5-(3-(5-(((2R,3R,4R,5R,6R)- 3-acetamido-4,5-dihydroxy-6-(hydroxymethyl)tetrahydro-2H-py ran-2-yl)oxy) pentanamido)propyl)-2-((hydroxyl)methyl)-4-methoxytetrahydr ofuran-3-oxyl
caaaggcctggggtgcagga

SEQ ID NO: 1095 - RNA, 20 nt, synthetic construct
  source 1..20: mol_type = other RNA
  modified_base 1: mod_base = OTHER; note = 2'-O-methyl-cytidine with phosphorothioate linkage
  modified_base 2: mod_base = OTHER; note = 2'-O-methyl-adenosine with phosphorothioate linkage
  modified_base 3: mod_base = OTHER; note = 2'-O-methyl-cytidine
  modified_base 4: mod_base = OTHER; note = 2'-O-methyl-adenosine
  modified_base 5: mod_base = OTHER; note = 2'-O-methyl-guanosine
  modified_base 6: mod_base = OTHER; note = 2'-fluoro-adenosine
  modified_base 7: mod_base = OTHER; note = 2'-O-methyl-adenosine
  modified_base 8: mod_base = OTHER; note = 2'-fluoro-guanosine
  modified_base 9: mod_base = OTHER; note = 2'-fluoro-guanosine
  modified_base 10: mod_base = OTHER; note = 2'-fluoro-guanosine
  modified_base 11: mod_base = OTHER; note = 2'-fluoro-adenosine
  modified_base 12: mod_base = OTHER; note = 2'-O-methyl-cytidine
  modified_base 13: mod_base = OTHER; note = 2'-O-methyl-uridine
  modified_base 14: mod_base = OTHER; note = 2'-O-methyl-guanosine
  modified_base 15: mod_base = OTHER; note = 2'-O-methyl-uridine
  modified_base 16: mod_base = OTHER; note = 2'-O-methyl-guanosine
  modified_base 17: mod_base = OTHER; note = 2'-O-methyl-guanosine
  modified_base 18: mod_base = OTHER; note = 2'-O-methyl-uridine with phosphorothioate linkage
  modified_base 19: mod_base = OTHER; note = 2'-O-methyl-cytidine with phosphorothioate linkage
  modified_base 20: mod_base = OTHER; note = 2'-O-methyl-adenosine
  modified_base 20: mod_base = OTHER; note = Nucleotide conjugated to 3 iterations of (2R,3R,4R,5S)-5-(3-(5-(((2R,3R,4R,5R,6R)- 3-acetamido-4,5-dihydroxy-6-(hydroxymethyl)tetrahydro-2H-py ran-2-yl)oxy) pentanamido)propyl)-2-((hydroxyl)methyl)-4-methoxytetrahydr ofuran-3-oxyl
cacagaagggactgtggtca

SEQ ID NO: 1096 - RNA, 20 nt, synthetic construct
  source 1..20: mol_type = other RNA
  modified_base 1: mod_base = OTHER; note = 2'-O-methyl-guanosine with phosphorothioate linkage
  modified_base 2: mod_base = OTHER; note = 2'-O-methyl-cytidine with phosphorothioate linkage
  modified_base 3: mod_base = OTHER; note = 2'-O-methyl-guanosine
  modified_base 4: mod_base = OTHER; note = 2'-O-methyl-adenosine
  modified_base 5: mod_base = OTHER; note = 2'-O-methyl-uridine
  modified_base 6: mod_base = OTHER; note = 2'-fluoro-guanosine
  modified_base 7: mod_base = OTHER; note = 2'-O-methyl-cytidine
  modified_base 8: mod_base = OTHER; note = 2'-fluoro-uridine
  modified_base 9: mod_base = OTHER; note = 2'-fluoro-cytidine
  modified_base 10: mod_base = OTHER; note = 2'-fluoro-adenosine
  modified_base 11: mod_base = OTHER; note = 2'-fluoro-guanosine
  modified_base 12: mod_base = OTHER; note = 2'-O-methyl-adenosine
  modified_base 13: mod_base = OTHER; note = 2'-O-methyl-cytidine
  modified_base 14: mod_base = OTHER; note = 2'-O-methyl-adenosine
  modified_base 15: mod_base = OTHER; note = 2'-O-methyl-cytidine
  modified_base 16: mod_base = OTHER; note = 2'-O-methyl-adenosine
  modified_base 17: mod_base = OTHER; note = 2'-O-methyl-guanosine
  modified_base 18: mod_base = OTHER; note = 2'-O-methyl-adenosine with phosphorothioate linkage
  modified_base 19: mod_base = OTHER; note = 2'-O-methyl-adenosine with phosphorothioate linkage
  modified_base 20: mod_base = OTHER; note = 2'-O-methyl-adenosine
  modified_base 20: mod_base = OTHER; note = Nucleotide conjugated to 3 iterations of (2R,3R,4R,5S)-5-(3-(5-(((2R,3R,4R,5R,6R)- 3-acetamido-4,5-dihydroxy-6-(hydroxymethyl)tetrahydro-2H-py ran-2-yl)oxy) pentanamido)propyl)-2-((hydroxyl)methyl)-4-methoxytetrahydr ofuran-3-oxyl
gcgatgctcagacacagaaa

SEQ ID NO: 1097 - RNA, 20 nt, synthetic construct
  source 1..20: mol_type = other RNA
  modified_base 1: mod_base = OTHER; note = 2'-O-methyl-uridine with phosphorothioate linkage
  modified_base 2: mod_base = OTHER; note = 2'-O-methyl-guanosine with phosphorothioate linkage
  modified_base 3: mod_base = OTHER; note = 2'-O-methyl-guanosine
  modified_base 4: mod_base = OTHER; note = 2'-O-methyl-guanosine
  modified_base 5: mod_base = OTHER; note = 2'-O-methyl-adenosine
  modified_base 6: mod_base = OTHER; note = 2'-fluoro-guanosine
  modified_base 7: mod_base = OTHER; note = 2'-O-methyl-uridine
  modified_base 8: mod_base = OTHER; note = 2'-fluoro-adenosine
  modified_base 9: mod_base = OTHER; note = 2'-fluoro-cytidine
  modified_base 10: mod_base = OTHER; note = 2'-fluoro-uridine
  modified_base 11: mod_base = OTHER; note = 2'-fluoro-guanosine
  modified_base 12: mod_base = OTHER; note = 2'-O-methyl-cytidine
  modified_base 13: mod_base = OTHER; note = 2'-O-methyl-adenosine
  modified_base 14: mod_base = OTHER; note = 2'-O-methyl-adenosine
  modified_base 15: mod_base = OTHER; note = 2'-O-methyl-cytidine
  modified_base 16: mod_base = OTHER; note = 2'-O-methyl-cytidine
  modified_base 17: mod_base = OTHER; note = 2'-O-methyl-uridine
  modified_base 18: mod_base = OTHER; note = 2'-O-methyl-guanosine with phosphorothioate linkage
  modified_base 19: mod_base = OTHER; note = 2'-O-methyl-adenosine with phosphorothioate linkage
  modified_base 20: mod_base = OTHER; note = 2'-O-methyl-adenosine
  modified_base 20: mod_base = OTHER; note = Nucleotide conjugated to 3 iterations of (2R,3R,4R,5S)-5-(3-(5-(((2R,3R,4R,5R,6R)- 3-acetamido-4,5-dihydroxy-6-(hydroxymethyl)tetrahydro-2H-py ran-2-yl)oxy) pentanamido)propyl)-2-((hydroxyl)methyl)-4-methoxytetrahydr ofuran-3-oxyl
tgggagtactgcaacctgaa

SEQ ID NO: 1098 - RNA, 20 nt, synthetic construct
  source 1..20: mol_type = other RNA
  modified_base 1: mod_base = OTHER; note = 2'-O-methyl-uridine with phosphorothioate linkage
  modified_base 2: mod_base = OTHER; note = 2'-O-methyl-guanosine with phosphorothioate linkage
  modified_base 3: mod_base = OTHER; note = 2'-O-methyl-adenosine
  modified_base 4: mod_base = OTHER; note = 2'-O-methyl-cytidine
  modified_base 5: mod_base = OTHER; note = 2'-O-methyl-guanosine
  modified_base 6: mod_base = OTHER; note = 2'-fluoro-cytidine
  modified_base 7: mod_base = OTHER; note = 2'-O-methyl-guanosine
  modified_base 8: mod_base = OTHER; note = 2'-fluoro-adenosine
  modified_base 9: mod_base = OTHER; note = 2'-fluoro-uridine
  modified_base 10: mod_base = OTHER; note = 2'-fluoro-guanosine
  modified_base 11: mod_base = OTHER; note = 2'-fluoro-cytidine
  modified_base 12: mod_base = OTHER; note = 2'-O-methyl-uridine
  modified_base 13: mod_base = OTHER; note = 2'-O-methyl-cytidine
  modified_base 14: mod_base = OTHER; note = 2'-O-methyl-adenosine
  modified_base 15: mod_base = OTHER; note = 2'-O-methyl-guanosine
  modified_base 16: mod_base = OTHER; note = 2'-O-methyl-adenosine
  modified_base 17: mod_base = OTHER; note = 2'-O-methyl-cytidine
  modified_base 18: mod_base = OTHER; note = 2'-O-methyl-adenosine with phosphorothioate linkage
  modified_base 19: mod_base = OTHER; note = 2'-O-methyl-cytidine with phosphorothioate linkage
  modified_base 20: mod_base = OTHER; note = 2'-O-methyl-adenosine
  modified_base 20: mod_base = OTHER; note = Nucleotide conjugated to 3 iterations of (2R,3R,4R,5S)-5-(3-(5-(((2R,3R,4R,5R,6R)- 3-acetamido-4,5-dihydroxy-6-(hydroxymethyl)tetrahydro-2H-py ran-2-yl)oxy) pentanamido)propyl)-2-((hydroxyl)methyl)-4-methoxytetrahydr ofuran-3-oxyl
tgacgcgatgctcagacaca

SEQ ID NO: 1099 - RNA, 20 nt, synthetic construct
  source 1..20: mol_type = other RNA
  modified_base 1: mod_base = OTHER; note = 2'-O-methyl-guanosine with phosphorothioate linkage
  modified_base 2: mod_base = OTHER; note = 2'-O-methyl-guanosine with phosphorothioate linkage
  modified_base 3: mod_base = OTHER; note = 2'-O-methyl-cytidine
  modified_base 4: mod_base = OTHER; note = 2'-O-methyl-cytidine
  modified_base 5: mod_base = OTHER; note = 2'-O-methyl-cytidine
  modified_base 6: mod_base = OTHER; note = 2'-fluoro-uridine
  modified_base 7: mod_base = OTHER; note = 2'-O-methyl-uridine
  modified_base 8: mod_base = OTHER; note = 2'-fluoro-guanosine
  modified_base 9: mod_base = OTHER; note = 2'-fluoro-guanosine
  modified_base 10: mod_base = OTHER; note = 2'-fluoro-uridine
  modified_base 11: mod_base = OTHER; note = 2'-fluoro-guanosine
  modified_base 12: mod_base = OTHER; note = 2'-O-methyl-uridine
  modified_base 13: mod_base = OTHER; note = 2'-O-methyl-uridine
  modified_base 14: mod_base = OTHER; note = 2'-O-methyl-uridine
  modified_base 15: mod_base = OTHER; note = 2'-O-methyl-uridine
  modified_base 16: mod_base = OTHER; note = 2'-O-methyl-adenosine
  modified_base 17: mod_base = OTHER; note = 2'-O-methyl-cytidine
  modified_base 18: mod_base = OTHER; note = 2'-O-methyl-cytidine with phosphorothioate linkage
  modified_base 19: mod_base = OTHER; note = 2'-O-methyl-adenosine with phosphorothioate linkage
  modified_base 20: mod_base = OTHER; note = 2'-O-methyl-adenosine
  modified_base 20: mod_base = OTHER; note = Nucleotide conjugated to 3 iterations of (2R,3R,4R,5S)-5-(3-(5-(((2R,3R,4R,5R,6R)- 3-acetamido-4,5-dihydroxy-6-(hydroxymethyl)tetrahydro-2H-py ran-2-yl)oxy) pentanamido)propyl)-2-((hydroxyl)methyl)-4-methoxytetrahydr ofuran-3-oxyl
ggcccttggtgttttaccaa

SEQ ID NO: 1100 - RNA, 20 nt, synthetic construct
  source 1..20: mol_type = other RNA
  modified_base 1: mod_base = OTHER; note = 2'-O-methyl-uridine with phosphorothioate linkage
  modified_base 2: mod_base = OTHER; note = 2'-O-methyl-guanosine with phosphorothioate linkage
  modified_base 3: mod_base = OTHER; note = 2'-O-methyl-adenosine
  modified_base 4: mod_base = OTHER; note = 2'-O-methyl-uridine
  modified_base 5: mod_base = OTHER; note = 2'-O-methyl-guanosine
  modified_base 6: mod_base = OTHER; note = 2'-fluoro-guanosine
  modified_base 7: mod_base = OTHER; note = 2'-O-methyl-adenosine
  modified_base 8: mod_base = OTHER; note = 2'-fluoro-cytidine
  modified_base 9: mod_base = OTHER; note = 2'-fluoro-adenosine
  modified_base 10: mod_base = OTHER; note = 2'-fluoro-guanosine
  modified_base 11: mod_base = OTHER; note = 2'-fluoro-adenosine
  modified_base 12: mod_base = OTHER; note = 2'-O-methyl-guanosine
  modified_base 13: mod_base = OTHER; note = 2'-O-methyl-uridine
  modified_base 14: mod_base = OTHER; note = 2'-O-methyl-uridine
  modified_base 15: mod_base = OTHER; note = 2'-O-methyl-adenosine
  modified_base 16: mod_base = OTHER; note = 2'-O-methyl-uridine
  modified_base 17: mod_base = OTHER; note = 2'-O-methyl-cytidine
  modified_base 18: mod_base = OTHER; note = 2'-O-methyl-guanosine with phosphorothioate linkage
  modified_base 19: mod_base = OTHER; note = 2'-O-methyl-adenosine with phosphorothioate linkage
  modified_base 20: mod_base = OTHER; note = 2'-O-methyl-adenosine
  modified_base 20: mod_base = OTHER; note = Nucleotide conjugated to 3 iterations of (2R,3R,4R,5S)-5-(3-(5-(((2R,3R,4R,5R,6R)- 3-acetamido-4,5-dihydroxy-6-(hydroxymethyl)tetrahydro-2H-py ran-2-yl)oxy) pentanamido)propyl)-2-((hydroxyl)methyl)-4-methoxytetrahydr ofuran-3-oxyl
tgatggacagagttatcgaa

SEQ ID NO: 1101 - RNA, 20 nt, synthetic construct
  source 1..20: mol_type = other RNA
  modified_base 1: mod_base = OTHER; note = 2'-O-methyl-adenosine with phosphorothioate linkage
  modified_base 2: mod_base = OTHER; note = 2'-O-methyl-cytidine with phosphorothioate linkage
  modified_base 3: mod_base = OTHER; note = 2'-O-methyl-adenosine
  modified_base 4: mod_base = OTHER; note = 2'-O-methyl-guanosine
  modified_base 5: mod_base = OTHER; note = 2'-O-methyl-adenosine
  modified_base 6: mod_base = OTHER; note = 2'-fluoro-adenosine
  modified_base 7: mod_base = OTHER; note = 2'-O-methyl-adenosine
  modified_base 8: mod_base = OTHER; note = 2'-fluoro-adenosine
  modified_base 9: mod_base = OTHER; note = 2'-fluoro-cytidine
  modified_base 10: mod_base = OTHER; note = 2'-fluoro-uridine
  modified_base 11: mod_base = OTHER; note = 2'-fluoro-adenosine
  modified_base 12: mod_base = OTHER; note = 2'-O-methyl-cytidine
  modified_base 13: mod_base = OTHER; note = 2'-O-methyl-cytidine
  modified_base 14: mod_base = OTHER; note = 2'-O-methyl-cytidine
  modified_base 15: mod_base = OTHER; note = 2'-O-methyl-adenosine
  modified_base 16: mod_base = OTHER; note = 2'-O-methyl-adenosine
  modified_base 17: mod_base = OTHER; note = 2'-O-methyl-adenosine
  modified_base 18: mod_base = OTHER; note = 2'-O-methyl-uridine with phosphorothioate linkage
  modified_base 19: mod_base = OTHER; note = 2'-O-methyl-guanosine with phosphorothioate linkage
  modified_base 20: mod_base = OTHER; note = 2'-O-methyl-adenosine
  modified_base 20: mod_base = OTHER; note = Nucleotide conjugated to 3 iterations of (2R,3R,4R,5S)-5-(3-(5-(((2R,3R,4R,5R,6R)- 3-acetamido-4,5-dihydroxy-6-(hydroxymethyl)tetrahydro-2H-py ran-2-yl)oxy) pentanamido)propyl)-2-((hydroxyl)methyl)-4-methoxytetrahydr ofuran-3-oxyl
acagaaaactacccaaatga

SEQ ID NO: 1102 - RNA, 20 nt, synthetic construct
  source 1..20: mol_type = other RNA
  misc_difference 20: note = Nucleotide conjugated to any number of any targeting ligand described herein
tgatggacagagttatcgaa

SEQ ID NO: 1103 - RNA, 20 nt, synthetic construct
  source 1..20: mol_type = other RNA
  misc_difference 20: note = Nucleotide conjugated to any number of any targeting ligand described herein
acagaaaactacccaaatga

SEQ ID NO: 1104 - RNA, 20 nt, synthetic construct
  source 1..20: mol_type = other RNA
  misc_difference 20: note = Nucleotide conjugated to any number of any targeting ligand described herein
ttggtcatctatgacaccaa

SEQ ID NO: 1105 - RNA, 20 nt, synthetic construct
  source 1..20: mol_type = other RNA
  misc_difference 20: note = Nucleotide conjugated to any number of any targeting ligand described herein
actacccaaatgctggctta

SEQ ID NO: 1106 - RNA, 20 nt, synthetic construct
  source 1..20: mol_type = other RNA
  misc_difference 20: note = Nucleotide conjugated to any number of any targeting ligand described herein
aggaaggacatgtcagtcta

SEQ ID NO: 1107 - RNA, 20 nt, synthetic construct
  source 1..20: mol_type = other RNA
  misc_difference 20: note = Nucleotide conjugated to any number of any targeting ligand described herein
atcaagtgtccttgcaacta

SEQ ID NO: 1108 - RNA, 20 nt, synthetic construct
  source 1..20: mol_type = other RNA
  misc_difference 20: note = Nucleotide conjugated to any number of any targeting ligand described herein
gtgatggacagagttatcga

SEQ ID NO: 1109 - RNA, 20 nt, synthetic construct
  source 1..20: mol_type = other RNA
  misc_difference 20: note = Nucleotide conjugated to any number of any targeting ligand described herein
atggtgatggacagagttaa

SEQ ID NO: 1110 - RNA, 20 nt, synthetic construct
  source 1..20: mol_type = other RNA
  misc_difference 20: note = Nucleotide conjugated to any number of any targeting ligand described herein
caacctgacacaatgctcaa

SEQ ID NO: 1111 - RNA, 20 nt, synthetic construct
  source 1..20: mol_type = other RNA
  misc_difference 20: note = Nucleotide conjugated to any number of any targeting ligand described herein
ggtgatggacagagttatca

SEQ ID NO: 1112 - RNA, 20 nt, synthetic construct
  source 1..20: mol_type = other RNA
  misc_difference 20: note = Nucleotide conjugated to any number of any targeting ligand described herein
cggtaatggacagagttata

SEQ ID NO: 1113 - RNA, 20 nt, synthetic construct
  source 1..20: mol_type = other RNA
  misc_difference 20: note = Nucleotide conjugated to any number of any targeting ligand described herein
caagcttggtcatctatgaa

SEQ ID NO: 1114 - RNA, 20 nt, synthetic construct
  source 1..20: mol_type = other RNA
  misc_difference 20: note = Nucleotide conjugated to any number of any targeting ligand described herein
tggtgatggacagagttata

SEQ ID NO: 1115 - RNA, 20 nt, synthetic construct
  source 1..20: mol_type = other RNA
  misc_difference 20: note = Nucleotide conjugated to any number of any targeting ligand described herein
agcttggtcatctatgacaa

SEQ ID NO: 1116 - RNA, 20 nt, synthetic construct
  source 1..20: mol_type = other RNA
  misc_difference 20: note = Nucleotide conjugated to any number of any targeting ligand described herein
agagttatcgaggcacatta

SEQ ID NO: 1117 - RNA, 20 nt, synthetic construct
  source 1..20: mol_type = other RNA
  misc_difference 20: note = Nucleotide conjugated to any number of any targeting ligand described herein
gcaacctgacacaatgctca

SEQ ID NO: 1118 - RNA, 20 nt, synthetic construct
  source 1..20: mol_type = other RNA
  misc_difference 20: note = Nucleotide conjugated to any number of any targeting ligand described herein
cttgccaagcttggtcatca

SEQ ID NO: 1119 - RNA, 20 nt, synthetic construct
  source 1..20: mol_type = other RNA
  misc_difference 20: note = Nucleotide conjugated to any number of any targeting ligand described herein
agaacttgccaagcttggta

SEQ ID NO: 1120 - RNA, 20 nt, synthetic construct
  source 1..20: mol_type = other RNA
  misc_difference 20: note = Nucleotide conjugated to any number of any targeting ligand described herein
tcatctatgacaccacacta

SEQ ID NO: 1121 - RNA, 20 nt, synthetic construct
  source 1..20: mol_type = other RNA
  misc_difference 20: note = Nucleotide conjugated to any number of any targeting ligand described herein
accatggtgatggacagaga

SEQ ID NO: 1122 - RNA, 20 nt, synthetic construct
  source 1..20: mol_type = other RNA
  misc_difference 20: note = Nucleotide conjugated to any number of any targeting ligand described herein
gacagagttatcgaggcaca

SEQ ID NO: 1123 - RNA, 20 nt, synthetic construct
  source 1..20: mol_type = other RNA
  misc_difference 20: note = Nucleotide conjugated to any number of any targeting ligand described herein
tggtcatctatgacaccaca

SEQ ID NO: 1124 - RNA, 20 nt, synthetic construct
  source 1..20: mol_type = other RNA
  misc_difference 20: note = Nucleotide conjugated to any number of any targeting ligand described herein
aggctcattctccaccacta

SEQ ID NO: 1125 - RNA, 20 nt, synthetic construct
  source 1..20: mol_type = other RNA
  misc_difference 20: note = Nucleotide conjugated to any number of any targeting ligand described herein
atggacagagttatcgagga

SEQ ID NO: 1126 - RNA, 20 nt, synthetic construct
  source 1..20: mol_type = other RNA
  misc_difference 20: note = Nucleotide conjugated to any number of any targeting ligand described herein
tgccaagcttggtcatctaa

SEQ ID NO: 1127 - RNA, 20 nt, synthetic construct
  source 1..20: mol_type = other RNA
  misc_difference 20: note = Nucleotide conjugated to any number of any targeting ligand described herein
tgcaacctgacacaatgcta

SEQ ID NO: 1128 - RNA, 20 nt, synthetic construct
  source 1..20: mol_type = other RNA
  misc_difference 20: note = Nucleotide conjugated to any number of any targeting ligand described herein
agttatcgaggcacattcta

SEQ ID NO: 1129 - RNA, 20 nt, synthetic construct
  source 1..20: mol_type = other RNA
  misc_difference 20: note = Nucleotide conjugated to any number of any targeting ligand described herein
aagcttggtcatctatgaca

SEQ ID NO: 1130 - RNA, 20 nt, synthetic construct
  source 1..20: mol_type = other RNA
  misc_difference 20: note = Nucleotide conjugated to any number of any targeting ligand described herein
catggtgatggacagagtta

SEQ ID NO: 1131 - RNA, 20 nt, synthetic construct
  source 1..20: mol_type = other RNA
  misc_difference 20: note = Nucleotide conjugated to any number of any targeting ligand described herein
tggacagagttatcgaggca

SEQ ID NO: 1132 - RNA, 20 nt, synthetic construct
  source 1..20: mol_type = other RNA
  misc_difference 20: note = Nucleotide conjugated to any number of any targeting ligand described herein
ggcctgaccaggaactacta

SEQ ID NO: 1133 - RNA, 20 nt, synthetic construct
  source 1..20: mol_type = other RNA
  misc_difference 20: note = Nucleotide conjugated to any number of any targeting ligand described herein
aagcaccacctgagaaaaga

SEQ ID NO: 1134 - RNA, 20 nt, synthetic construct
  source 1..20: mol_type = other RNA
  misc_difference 20: note = Nucleotide conjugated to any number of any targeting ligand described herein
gagttatcgaggcacattca

SEQ ID NO: 1135 - RNA, 20 nt, synthetic construct
  source 1..20: mol_type = other RNA
  misc_difference 20: note = Nucleotide conjugated to any number of any targeting ligand described herein
acctgccaagcttggtcata

SEQ ID NO: 1136 - RNA, 20 nt, synthetic construct
  source 1..20: mol_type = other RNA
  misc_difference 20: note = Nucleotide conjugated to any number of any targeting ligand described herein
aacttgccaagcttggtcaa

SEQ ID NO: 1137 - RNA, 20 nt, synthetic construct
  source 1..20: mol_type = other RNA
  misc_difference 20: note = Nucleotide conjugated to any number of any targeting ligand described herein
gaaatccagatcctgtggca

SEQ ID NO: 1138 - RNA, 20 nt, synthetic construct
  source 1..20: mol_type = other RNA
  misc_difference 20: note = Nucleotide conjugated to any number of any targeting ligand described herein
aacctgacacaatgctcaga

SEQ ID NO: 1139 - RNA, 20 nt, synthetic construct
  source 1..20: mol_type = other RNA
  misc_difference 20: note = Nucleotide conjugated to any number of any targeting ligand described herein
ccatggtgatggacagagta

SEQ ID NO: 1140 - RNA, 20 nt, synthetic construct
  source 1..20: mol_type = other RNA
  misc_difference 20: note = Nucleotide conjugated to any number of any targeting ligand described herein
cagagttatcgaggcacata

SEQ ID NO: 1141 - RNA, 20 nt, synthetic construct
  source 1..20: mol_type = other RNA
  misc_difference 20: note = Nucleotide conjugated to any number of any targeting ligand described herein
tgccaagcttggtcatctaa

SEQ ID NO: 1142 - RNA, 20 nt, synthetic construct
  source 1..20: mol_type = other RNA
  misc_difference 20: note = Nucleotide conjugated to any number of any targeting ligand described herein
tcaagtgtccttgcaactca

SEQ ID NO: 1143 - RNA, 20 nt, synthetic construct
  source 1..20: mol_type = other RNA
  misc_difference 20: note = Nucleotide conjugated to any number of any targeting ligand described herein
catctatgacaccacactca

SEQ ID NO: 1144 - RNA, 20 nt, synthetic construct
  source 1..20: mol_type = other RNA
  misc_difference 20: note = Nucleotide conjugated to any number of any targeting ligand described herein
aacctgccaagcttggtcaa

SEQ ID NO: 1145 - RNA, 20 nt, synthetic construct
  source 1..20: mol_type = other RNA
  misc_difference 20: note = Nucleotide conjugated to any number of any targeting ligand described herein
gaacaagcaccgactgagca

SEQ ID NO: 1146 - RNA, 20 nt, synthetic construct
  source 1..20: mol_type = other RNA
  misc_difference 20: note = Nucleotide conjugated to any number of any targeting ligand described herein
gttatcgaggctcattctca

SEQ ID NO: 1147 - RNA, 20 nt, synthetic construct
  source 1..20: mol_type = other RNA
  misc_difference 20: note = Nucleotide conjugated to any number of any targeting ligand described herein
gaatcaagtgtccttgcaaa

SEQ ID NO: 1148 - RNA, 20 nt, synthetic construct
  source 1..20: mol_type = other RNA
  misc_difference 20: note = Nucleotide conjugated to any number of any targeting ligand described herein
gtcagatgggagtactgcaa

SEQ ID NO: 1149 - RNA, 20 nt, synthetic construct
  source 1..20: mol_type = other RNA
  misc_difference 20: note = Nucleotide conjugated to any number of any targeting ligand described herein
gcacattctccaccactgta

SEQ ID NO: 1150 - RNA, 20 nt, synthetic construct
  source 1..20: mol_type = other RNA
  misc_difference 20: note = Nucleotide conjugated to any number of any targeting ligand described herein
gccaagcttggtcatctata

SEQ ID NO: 1151 - RNA, 20 nt, synthetic construct
  source 1..20: mol_type = other RNA
  misc_difference 20: note = Nucleotide conjugated to any number of any targeting ligand described herein
tactgcaacctgacacaata

SEQ ID NO: 1152 - RNA, 20 nt, synthetic construct
  source 1..20: mol_type = other RNA
  misc_difference 20: note = Nucleotide conjugated to any number of any targeting ligand described herein
tgctaccatggtgatggaca

SEQ ID NO: 1153 - RNA, 20 nt, synthetic construct
  source 1..20: mol_type = other RNA
  misc_difference 20: note = Nucleotide conjugated to any number of any targeting ligand described herein
ttggtcatccatgacaccaa

SEQ ID NO: 1154 - RNA, 20 nt, synthetic construct
  source 1..20: mol_type = other RNA
  misc_difference 20: note = Nucleotide conjugated to any number of any targeting ligand described herein
acccaaatgctggcttgata

SEQ ID NO: 1155 - RNA, 20 nt, synthetic construct
  source 1..20: mol_type = other RNA
  misc_difference 20: note = Nucleotide conjugated to any number of any targeting ligand described herein
caggattgctaccatggtga

SEQ ID NO: 1156 - RNA, 20 nt, synthetic construct
  source 1..20: mol_type = other RNA
  misc_difference 20: note = Nucleotide conjugated to any number of any targeting ligand described herein
ggcctgaccaggaactacta

SEQ ID NO: 1157 - RNA, 20 nt, synthetic construct
  source 1..20: mol_type = other RNA
  misc_difference 20: note = Nucleotide conjugated to any number of any targeting ligand described herein
aaggacctgccaagcttgga

SEQ ID NO: 1158 - RNA, 20 nt, synthetic construct
  source 1..20: mol_type = other RNA
  misc_difference 20: note = Nucleotide conjugated to any number of any targeting ligand described herein
ttccgaacaagcaccgacta

SEQ ID NO: 1159 - RNA, 20 nt, synthetic construct
  source 1..20: mol_type = other RNA
  misc_difference 20: note = Nucleotide conjugated to any number of any targeting ligand described herein
ggagtactgcaacctgacga

SEQ ID NO: 1160 - RNA, 20 nt, synthetic construct
  source 1..20: mol_type = other RNA
  misc_difference 20: note = Nucleotide conjugated to any number of any targeting ligand described herein
acaggaaggacatgtcagta

SEQ ID NO: 1161 - RNA, 20 nt, synthetic construct
  source 1..20: mol_type = other RNA
  misc_difference 20: note = Nucleotide conjugated to any number of any targeting ligand described herein
caagcaccacctgagaaaaa

SEQ ID NO: 1162 - RNA, 20 nt, synthetic construct
  source 1..20: mol_type = other RNA
  misc_difference 20: note = Nucleotide conjugated to any number of any targeting ligand described herein
acacaatgctcagacgcaga

SEQ ID NO: 1163 - RNA, 20 nt, synthetic construct
  source 1..20: mol_type = other RNA
  misc_difference 20: note = Nucleotide conjugated to any number of any targeting ligand described herein
ggaaggacatgtcagtctta

SEQ ID NO: 1164 - RNA, 20 nt, synthetic construct
  source 1..20: mol_type = other RNA
  misc_difference 20: note = Nucleotide conjugated to any number of any targeting ligand described herein
gtggcagccccttattgtta

SEQ ID NO: 1165 - RNA, 20 nt, synthetic construct
  source 1..20: mol_type = other RNA
  misc_difference 20: note = Nucleotide conjugated to any number of any targeting ligand described herein
gagattcgcccttggtgtta

SEQ ID NO: 1166 - RNA, 20 nt, synthetic construct
  source 1..20: mol_type = other RNA
  misc_difference 20: note = Nucleotide conjugated to any number of any targeting ligand described herein
gtcagatgggagtactgcaa

SEQ ID NO: 1167 - RNA, 20 nt, synthetic construct
  source 1..20: mol_type = other RNA
  misc_difference 20: note = Nucleotide conjugated to any number of any targeting ligand described herein
tgaccaggaactactgcaga

SEQ ID NO: 1168 - RNA, 20 nt, synthetic construct
  source 1..20: mol_type = other RNA
  misc_difference 20: note = Nucleotide conjugated to any number of any targeting ligand described herein
ctgaagaagcaccaactgaa

SEQ ID NO: 1169 - RNA, 20 nt, synthetic construct
  source 1..20: mol_type = other RNA
  misc_difference 20: note = Nucleotide conjugated to any number of any targeting ligand described herein
cagtgtcaggtgggagtaca

SEQ ID NO: 1170 - RNA, 20 nt, synthetic construct
  source 1..20: mol_type = other RNA
  misc_difference 20: note = Nucleotide conjugated to any number of any targeting ligand described herein
gatgggagtactgcaaccta

SEQ ID NO: 1171 - RNA, 20 nt, synthetic construct
  source 1..20: mol_type = other RNA
  misc_difference 20: note = Nucleotide conjugated to any number of any targeting ligand described herein
gatggacagagttatcgaga

SEQ ID NO: 1172 - RNA, 20 nt, synthetic construct
  source 1..20: mol_type = other RNA
  misc_difference 20: note = Nucleotide conjugated to any number of any targeting ligand described herein
gaaggacatgtcagtcttga

SEQ ID NO: 1173 - RNA, 20 nt, synthetic construct
  source 1..20: mol_type = other RNA
  misc_difference 20: note = Nucleotide conjugated to any number of any targeting ligand described herein
tccagtgacagaatcaagta

SEQ ID NO: 1174 - RNA, 20 nt, synthetic construct
  source 1..20: mol_type = other RNA
  misc_difference 20: note = Nucleotide conjugated to any number of any targeting ligand described herein
cagaggacaacagaatatta

SEQ ID NO: 1175 - RNA, 20 nt, synthetic construct
  source 1..20: mol_type = other RNA
  misc_difference 20: note = Nucleotide conjugated to any number of any targeting ligand described herein
cagccccttattgttataca

SEQ ID NO: 1176 - RNA, 20 nt, synthetic construct
  source 1..20: mol_type = other RNA
  misc_difference 20: note = Nucleotide conjugated to any number of any targeting ligand described herein
tacccaaatggtggcctgaa

SEQ ID NO: 1177 - RNA, 20 nt, synthetic construct
  source 1..20: mol_type = other RNA
  misc_difference 20: note = Nucleotide conjugated to any number of any targeting ligand described herein
gaggacaacagaatattata

SEQ ID NO: 1178 - RNA, 20 nt, synthetic construct
  source 1..20: mol_type = other RNA
  misc_difference 20: note = Nucleotide conjugated to any number of any targeting ligand described herein
cagagttatcgaggctcata

SEQ ID NO: 1179 - RNA, 20 nt, synthetic construct
  source 1..20: mol_type = other RNA
  misc_difference 20: note = Nucleotide conjugated to any number of any targeting ligand described herein
cccggttccaagcctagaga

SEQ ID NO: 1180 - RNA, 20 nt, synthetic construct
  source 1..20: mol_type = other RNA
  misc_difference 20: note = Nucleotide conjugated to any number of any targeting ligand described herein
aggacaacagaatattatca

SEQ ID NO: 1181 - RNA, 20 nt, synthetic construct
  source 1..20: mol_type = other RNA
  misc_difference 20: note = Nucleotide conjugated to any number of any targeting ligand described herein
gtcaggtgggagtactgcaa

SEQ ID NO: 1182 - RNA, 20 nt, synthetic construct
  source 1..20: mol_type = other RNA
  misc_difference 20: note = Nucleotide conjugated to any number of any targeting ligand described herein
tgtcacaggaaggacatgta

SEQ ID NO: 1183 - RNA, 20 nt, synthetic construct
  source 1..20: mol_type = other RNA
  misc_difference 20: note = Nucleotide conjugated to any number of any targeting ligand described herein
ctgtggcagccccttattga

SEQ ID NO: 1184 - RNA, 20 nt, synthetic construct
  source 1..20: mol_type = other RNA
  misc_difference 20: note = Nucleotide conjugated to any number of any targeting ligand described herein
ggtcctctatgacaccacaa

SEQ ID NO: 1185 - RNA, 20 nt, synthetic construct
  source 1..20: mol_type = other RNA
  misc_difference 20: note = Nucleotide conjugated to any number of any targeting ligand described herein
tctgaagaagcaccaacgga

SEQ ID NO: 1186 - RNA, 20 nt, synthetic construct
  source 1..20: mol_type = other RNA
  misc_difference 20: note = Nucleotide conjugated to any number of any targeting ligand described herein
aggacatgtcagtcttggta

SEQ ID NO: 1187 - RNA, 20 nt, synthetic construct
  source 1..20: mol_type = other RNA
  misc_difference 20: note = Nucleotide conjugated to any number of any targeting ligand described herein
agttatcgaggctcattcta

SEQ ID NO: 1188 - RNA, 20 nt, synthetic construct
  source 1..20: mol_type = other RNA
  misc_difference 20: note = Nucleotide conjugated to any number of any targeting ligand described herein
acaggaagaacctgccaaga

SEQ ID NO: 1189 - RNA, 20 nt, synthetic construct
  source 1..20: mol_type = other RNA
  misc_difference 20: note = Nucleotide conjugated to any number of any targeting ligand described herein
aagaagcaccaacggagcaa

SEQ ID NO: 1190 - RNA, 20 nt, synthetic construct
  source 1..20: mol_type = other RNA
  misc_difference 20: note = Nucleotide conjugated to any number of any targeting ligand described herein
catcagaggacaacagaata

SEQ ID NO: 1191 - RNA, 20 nt, synthetic construct
  source 1..20: mol_type = other RNA
  misc_difference 20: note = Nucleotide conjugated to any number of any targeting ligand described herein
ggaagaacttgccaagctta

SEQ ID NO: 1192 - RNA, 20 nt, synthetic construct
  source 1..20: mol_type = other RNA
  misc_difference 20: note = Nucleotide conjugated to any number of any targeting ligand described herein
ctaccatggtgatggacaga

SEQ ID NO: 1193 - RNA, 20 nt, synthetic construct
  source 1..20: mol_type = other RNA
  misc_difference 20: note = Nucleotide conjugated to any number of any targeting ligand described herein
aaggacatgtcagtcttgga

SEQ ID NO: 1194 - RNA, 20 nt, synthetic construct
  source 1..20: mol_type = other RNA
  misc_difference 20: note = Nucleotide conjugated to any number of any targeting ligand described herein
gaagaacttgccaagcttga

SEQ ID NO: 1195 - RNA, 20 nt, synthetic construct
  source 1..20: mol_type = other RNA
  misc_difference 20: note = Nucleotide conjugated to any number of any targeting ligand described herein
catgtcagtcttggtcctca

SEQ ID NO: 1196 - RNA, 20 nt, synthetic construct
  source 1..20: mol_type = other RNA
  misc_difference 20: note = Nucleotide conjugated to any number of any targeting ligand described herein
ttgccaagcttggtcatcta

SEQ ID NO: 1197 - RNA, 20 nt, synthetic construct
  source 1..20: mol_type = other RNA
  misc_difference 20: note = Nucleotide conjugated to any number of any targeting ligand described herein
ggtgggagtactgcaaccta

SEQ ID NO: 1198 - RNA, 20 nt, synthetic construct
  source 1..20: mol_type = other RNA
  misc_difference 20: note = Nucleotide conjugated to any number of any targeting ligand described herein
tcagtcttggtcctctatga

SEQ ID NO: 1199 - RNA, 20 nt, synthetic construct
  source 1..20: mol_type = other RNA
  misc_difference 20: note = Nucleotide conjugated to any number of any targeting ligand described herein
gttatcgaggcacattctca

SEQ ID NO: 1200 - RNA, 20 nt, synthetic construct
  source 1..20: mol_type = other RNA
  misc_difference 20: note = Nucleotide conjugated to any number of any targeting ligand described herein
acaggaaggacatgtcaata

SEQ ID NO: 1201 - RNA, 20 nt, synthetic construct
  source 1..20: mol_type = other RNA
  misc_difference 20: note = Nucleotide conjugated to any number of any targeting ligand described herein
tcagaggacaacagaatata

SEQ ID NO: 1202 - RNA, 20 nt, synthetic construct
  source 1..20: mol_type = other RNA
  misc_difference 20: note = Nucleotide conjugated to any number of any targeting ligand described herein
atactacccaaatggtggca

SEQ ID NO: 1203 - RNA, 20 nt, synthetic construct
  source 1..20: mol_type = other RNA
  misc_difference 20: note = Nucleotide conjugated to any number of any targeting ligand described herein
tcggaccccagaaaactaca

SEQ ID NO: 1204 - RNA, 20 nt, synthetic construct
  source 1..20: mol_type = other RNA
  misc_difference 20: note = Nucleotide conjugated to any number of any targeting ligand described herein
cctgacacaatgtccagtga

SEQ ID NO: 1205 - RNA, 20 nt, synthetic construct
  source 1..20: mol_type = other RNA
  misc_difference 20: note = Nucleotide conjugated to any number of any targeting ligand described herein
ctctatgacaccacactgga

SEQ ID NO: 1206 - RNA, 20 nt, synthetic construct
  source 1..20: mol_type = other RNA
  misc_difference 20: note = Nucleotide conjugated to any number of any targeting ligand described herein
gtgacagaatcaagtgtcca

SEQ ID NO: 1207 - RNA, 20 nt, synthetic construct
  source 1..20: mol_type = other RNA
  misc_difference 20: note = Nucleotide conjugated to any number of any targeting ligand described herein
aatcaagtgtccttgcaaca

SEQ ID NO: 1208 - RNA, 20 nt, synthetic construct
  source 1..20: mol_type = other RNA
  misc_difference 20: note = Nucleotide conjugated to any number of any targeting ligand described herein
ccatgtggtccaggattgca

SEQ ID NO: 1209 - RNA, 20 nt, synthetic construct
  source 1..20: mol_type = other RNA
  misc_difference 20: note = Nucleotide conjugated to any number of any targeting ligand described herein
gaagaacctgccaagcttga

SEQ ID NO: 1210 - RNA, 20 nt, synthetic construct
  source 1..20: mol_type = other RNA
  misc_difference 20: note = Nucleotide conjugated to any number of any targeting ligand described herein
tggtgttacaccatggatca

SEQ ID NO: 1211 - RNA, 20 nt, synthetic construct
  source 1..20: mol_type = other RNA
  misc_difference 20: note = Nucleotide conjugated to any number of any targeting ligand described herein
agaggacaacagaatattaa

SEQ ID NO: 1212 - RNA, 20 nt, synthetic construct
  source 1..20: mol_type = other RNA
  misc_difference 20: note = Nucleotide conjugated to any number of any targeting ligand described herein
tggcagccccttggtgttaa

SEQ ID NO: 1213 - RNA, 20 nt, synthetic construct
  source 1..20: mol_type = other RNA
  misc_difference 20: note = Nucleotide conjugated to any number of any targeting ligand described herein
attgctaccatggtgatgga

SEQ ID NO: 1214 - RNA, 20 nt, synthetic construct
  source 1..20: mol_type = other RNA
  misc_difference 20: note = Nucleotide conjugated to any number of any targeting ligand described herein
caggaatccagatgctgaga

SEQ ID NO: 1215 - RNA, 20 nt, synthetic construct
  source 1..20: mol_type = other RNA
  misc_difference 20: note = Nucleotide conjugated to any number of any targeting ligand described herein
caggaatccagatcctgtga

SEQ ID NO: 1216 - RNA, 20 nt, synthetic construct
  source 1..20: mol_type = other RNA
  misc_difference 20: note = Nucleotide conjugated to any number of any targeting ligand described herein
gtcacaggaaggacctgcca

SEQ ID NO: 1217 - RNA, 20 nt, synthetic construct
  source 1..20: mol_type = other RNA
  misc_difference 20: note = Nucleotide conjugated to any number of any targeting ligand described herein
caggaaggacatgtcagtca

SEQ ID NO: 1218 - RNA, 20 nt, synthetic construct
  source 1..20: mol_type = other RNA
  misc_difference 20: note = Nucleotide conjugated to any number of any targeting ligand described herein
caggaactactgcaggaata

SEQ ID NO: 1219 - RNA, 20 nt, synthetic construct
  source 1..20: mol_type = other RNA
  misc_difference 20: note = Nucleotide conjugated to any number of any targeting ligand described herein
actgcaacctgacacaatga

SEQ ID NO: 1220 - RNA, 20 nt, synthetic construct
  source 1..20: mol_type = other RNA
  misc_difference 20: note = Nucleotide conjugated to any number of any targeting ligand described herein
ctacccaaatgctggcttga

SEQ ID NO: 1221 - RNA, 20 nt, synthetic construct
  source 1..20: mol_type = other RNA
  misc_difference 20: note = Nucleotide conjugated to any number of any targeting ligand described herein
caccatggatcccagtgtca

SEQ ID NO: 1222 - RNA, 20 nt, synthetic construct
  source 1..20: mol_type = other RNA
  misc_difference 20: note = Nucleotide conjugated to any number of any targeting ligand described herein
gaacttgccaagcttggtca

SEQ ID NO: 1223 - RNA, 20 nt, synthetic construct
  source 1..20: mol_type = other RNA
  misc_difference 20: note = Nucleotide conjugated to any number of any targeting ligand described herein
acctgacacaatgctcagaa

SEQ ID NO: 1224 - RNA, 20 nt, synthetic construct
  source 1..20: mol_type = other RNA
  misc_difference 20: note = Nucleotide conjugated to any number of any targeting ligand described herein
ctgcaacctgacacaatgca

SEQ ID NO: 1225 - RNA, 20 nt, synthetic construct
  source 1..20: mol_type = other RNA
  misc_difference 20: note = Nucleotide conjugated to any number of any targeting ligand described herein
acaagcaccaactgagcaaa

SEQ ID NO: 1226 - RNA, 20 nt, synthetic construct
  source 1..20: mol_type = other RNA
  misc_difference 20: note = Nucleotide conjugated to any number of any targeting ligand described herein
cccttggtgttataccatga

SEQ ID NO: 1227 - RNA, 20 nt, synthetic construct
  source 1..20: mol_type = other RNA
  misc_difference 20: note = Nucleotide conjugated to any number of any targeting ligand described herein
taccattatggacagagtta

SEQ ID NO: 1228 - RNA, 20 nt, synthetic construct
  source 1..20: mol_type = other RNA
  misc_difference 20: note = Nucleotide conjugated to any number of any targeting ligand described herein
tgccgaaatccagatcctga

SEQ ID NO: 1229 - RNA, 20 nt, synthetic construct
  source 1..20: mol_type = other RNA
  misc_difference 20: note = Nucleotide conjugated to any number of any targeting ligand described herein
aatccagatgctgagattca

SEQ ID NO: 1230 - RNA, 20 nt, synthetic construct
  source 1..20: mol_type = other RNA
  misc_difference 20: note = Nucleotide conjugated to any number of any targeting ligand described herein
cgaggcacattctccaccaa

SEQ ID NO: 1231 - RNA, 20 nt, synthetic construct
  source 1..20: mol_type = other RNA
  misc_difference 20: note = Nucleotide conjugated to any number of any targeting ligand described herein
tacccaaatgctggcctgaa

SEQ ID NO: 1232 - RNA, 20 nt, synthetic construct
  source 1..20: mol_type = other RNA
  misc_difference 20: note = Nucleotide conjugated to any number of any targeting ligand described herein
actgcaggaatccagatgca

SEQ ID NO: 1233 - RNA, 20 nt, synthetic construct
  source 1..20: mol_type = other RNA
  misc_difference 20: note = Nucleotide conjugated to any number of any targeting ligand described herein
ggacagagttatcgaggcaa

SEQ ID NO: 1234 - RNA, 20 nt, synthetic construct
  source 1..20: mol_type = other RNA
  misc_difference 20: note = Nucleotide conjugated to any number of any targeting ligand described herein
ctcagacgcagaagggacta

SEQ ID NO: 1235 - RNA, 20 nt, synthetic construct
  source 1..20: mol_type = other RNA
  misc_difference 20: note = Nucleotide conjugated to any number of any targeting ligand described herein
agaactactgccgaaatcca

SEQ ID NO: 1236 - RNA, 20 nt, synthetic construct
  source 1..20: mol_type = other RNA
  misc_difference 20: note = Nucleotide conjugated to any number of any targeting ligand described herein
gcttggtcatctatgacaca

SEQ ID NO: 1237 - RNA, 20 nt, synthetic construct
  source 1..20: mol_type = other RNA
  misc_difference 20: note = Nucleotide conjugated to any number of any targeting ligand described herein
cacaggaagaacatgtcaga

SEQ ID NO: 1238 - RNA, 20 nt, synthetic construct
  source 1..20: mol_type = other RNA
  misc_difference 20: note = Nucleotide conjugated to any number of any targeting ligand described herein
caaatgctggcctgaccaga

SEQ ID NO: 1239 - RNA, 20 nt, synthetic construct
  source 1..20: mol_type = other RNA
  misc_difference 20: note = Nucleotide conjugated to any number of any targeting ligand described herein
agaagcaccaactgaaaaca

SEQ ID NO: 1240 - RNA, 20 nt, synthetic construct
  source 1..20: mol_type = other RNA
  misc_difference 20: note = Nucleotide conjugated to any number of any targeting ligand described herein
caccacactggcatcagaga

SEQ ID NO: 1241 - RNA, 20 nt, synthetic construct
  source 1..20: mol_type = other RNA
  misc_difference 20: note = Nucleotide conjugated to any number of any targeting ligand described herein
ggattgctaccatggtgata

SEQ ID NO: 1242 - RNA, 20 nt, synthetic construct
  source 1..20: mol_type = other RNA
  misc_difference 20: note = Nucleotide conjugated to any number of any targeting ligand described herein
atcgaggctcattctccaca

SEQ ID NO: 1243 - RNA, 20 nt, synthetic construct
  source 1..20: mol_type = other RNA
  misc_difference 20: note = Nucleotide conjugated to any number of any targeting ligand described herein
gcatcagaggacaacagaaa

SEQ ID NO: 1244 - RNA, 20 nt, synthetic construct
  source 1..20: mol_type = other RNA
  misc_difference 20: note = Nucleotide conjugated to any number of any targeting ligand described herein
acacaatgtccagtgacaga

SEQ ID NO: 1245 - RNA, 20 nt, synthetic construct
  source 1..20: mol_type = other RNA
  misc_difference 20: note = Nucleotide conjugated to any number of any targeting ligand described herein
ggctccttctgaacaagcaa

SEQ ID NO: 1246 - RNA, 20 nt, synthetic construct
  source 1..20: mol_type = other RNA
  misc_difference 20: note = Nucleotide conjugated to any number of any targeting ligand described herein
aagcaccgactgagcaaaga

SEQ ID NO: 1247 - RNA, 20 nt, synthetic construct
  source 1..20: mol_type = other RNA
  misc_difference 20: note = Nucleotide conjugated to any number of any targeting ligand described herein
tggcatcagaggacaacaga

SEQ ID NO: 1248 - RNA, 20 nt, synthetic construct
  source 1..20: mol_type = other RNA
  misc_difference 20: note = Nucleotide conjugated to any number of any targeting ligand described herein
aagaacttgccaagcttgga

SEQ ID NO: 1249 - RNA, 20 nt, synthetic construct
  source 1..20: mol_type = other RNA
  misc_difference 20: note = Nucleotide conjugated to any number of any targeting ligand described herein
ggtccaggattgctaccata

SEQ ID NO: 1250 - RNA, 20 nt, synthetic construct
  source 1..20: mol_type = other RNA
  misc_difference 20: note = Nucleotide conjugated to any number of any targeting ligand described herein
ttcgcccttggtgttataca

SEQ ID NO: 1251 - RNA, 20 nt, synthetic construct
  source 1..20: mol_type = other RNA
  misc_difference 20: note = Nucleotide conjugated to any number of any targeting ligand described herein
taccatggatcccagtgtca

SEQ ID NO: 1252 - RNA, 20 nt, synthetic construct
  source 1..20: mol_type = other RNA
  misc_difference 20: note = Nucleotide conjugated to any number of any targeting ligand described herein
ccaccactgtcacaggaaga

SEQ ID NO: 1253 - RNA, 20 nt, synthetic construct
  source 1..20: mol_type = other RNA
  misc_difference 20: note = Nucleotide conjugated to any number of any targeting ligand described herein
atcccagtgtcaggtgggaa

SEQ ID NO: 1254 - RNA, 20 nt, synthetic construct
  source 1..20: mol_type = other RNA
  misc_difference 20: note = Nucleotide conjugated to any number of any targeting ligand described herein
cagaaaactacccaaatgca

SEQ ID NO: 1255 - RNA, 20 nt, synthetic construct
  source 1..20: mol_type = other RNA
  misc_difference 20: note = Nucleotide conjugated to any number of any targeting ligand described herein
cccaaatgctggcttgatca

SEQ ID NO: 1256 - RNA, 20 nt, synthetic construct
  source 1..20: mol_type = other RNA
  misc_difference 20: note = Nucleotide conjugated to any number of any targeting ligand described herein
tggggtgcaggagtgctaca

SEQ ID NO: 1257 - RNA, 20 nt, synthetic construct
  source 1..20: mol_type = other RNA
  misc_difference 20: note = Nucleotide conjugated to any number of any targeting ligand described herein
accccagaaaactacccaaa

SEQ ID NO: 1258 - RNA, 20 nt, synthetic construct
  source 1..20: mol_type = other RNA
  misc_difference 20: note = Nucleotide conjugated to any number of any targeting ligand described herein
cctgacacaatgctcagaca

SEQ ID NO: 1259 - RNA, 20 nt, synthetic construct
  source 1..20: mol_type = other RNA
  misc_difference 20: note = Nucleotide conjugated to any number of any targeting ligand described herein
tggtgttataccatggatca

SEQ ID NO: 1260 - RNA, 20 nt, synthetic construct
  source 1..20: mol_type = other RNA
  misc_difference 20: note = Nucleotide conjugated to any number of any targeting ligand described herein
atggatcccagtgtcaggta

SEQ ID NO: 1261 - RNA, 20 nt, synthetic construct
  source 1..20: mol_type = other RNA
  misc_difference 20: note = Nucleotide conjugated to any number of any targeting ligand described herein
gcttcttctgaagaagcaca

SEQ ID NO: 1262 - RNA, 20 nt, synthetic construct
  source 1..20: mol_type = other RNA
  misc_difference 20: note = Nucleotide conjugated to any number of any targeting ligand described herein
atagtcggaccccagaaaaa

SEQ ID NO: 1263 - RNA, 20 nt, synthetic construct
  source 1..20: mol_type = other RNA
  misc_difference 20: note = Nucleotide conjugated to any number of any targeting ligand described herein
taccatggatcccaatgtca

SEQ ID NO: 1264 - RNA, 20 nt, synthetic construct
  source 1..20: mol_type = other RNA
  misc_difference 20: note = Nucleotide conjugated to any number of any targeting ligand described herein
atcagaggacaacagaataa

SEQ ID NO: 1265 - RNA, 20 nt, synthetic construct
  source 1..20: mol_type = other RNA
  misc_difference 20: note = Nucleotide conjugated to any number of any targeting ligand described herein
cacaactcccacggtggtca

SEQ ID NO: 1266 - RNA, 20 nt, synthetic construct
  source 1..20: mol_type = other RNA
  misc_difference 20: note = Nucleotide conjugated to any number of any targeting ligand described herein
gaggctccttccgaacaaga

SEQ ID NO: 1267 - RNA, 20 nt, synthetic construct
  source 1..20: mol_type = other RNA
  misc_difference 20: note = Nucleotide conjugated to any number of any targeting ligand described herein
gcaacctgacacaatgtcca

SEQ ID NO: 1268 - RNA, 20 nt, synthetic construct
  source 1..20: mol_type = other RNA
  misc_difference 20: note = Nucleotide conjugated to any number of any targeting ligand described herein
tcctgtggcagccccttata

SEQ ID NO: 1269 - RNA, 20 nt, synthetic construct
  source 1..20: mol_type = other RNA
  misc_difference 20: note = Nucleotide conjugated to any number of any targeting ligand described herein
caggaaggacctgccaagca

SEQ ID NO: 1270 - RNA, 20 nt, synthetic construct
  source 1..20: mol_type = other RNA
  misc_difference 20: note = Nucleotide conjugated to any number of any targeting ligand described herein
aatccagatcctgtggcaga

SEQ ID NO: 1271 - RNA, 20 nt, synthetic construct
  source 1..20: mol_type = other RNA
  misc_difference 20: note = Nucleotide conjugated to any number of any targeting ligand described herein
tacccaaatgctggcttgaa

SEQ ID NO: 1272 - RNA, 20 nt, synthetic construct
  source 1..20: mol_type = other RNA
  misc_difference 20: note = Nucleotide conjugated to any number of any targeting ligand described herein
ggacagagttatcaaggcaa

SEQ ID NO: 1273 - RNA, 20 nt, synthetic construct
  source 1..20: mol_type = other RNA
  misc_difference 20: note = Nucleotide conjugated to any number of any targeting ligand described herein
actgagcaaaggcctgggga

SEQ ID NO: 1274 - RNA, 20 nt, synthetic construct
  source 1..20: mol_type = other RNA
  misc_difference 20: note = Nucleotide conjugated to any number of any targeting ligand described herein
caccacaccagcatagtcga

SEQ ID NO: 1275 - RNA, 20 nt, synthetic construct
  source 1..20: mol_type = other RNA
  misc_difference 20: note = Nucleotide conjugated to any number of any targeting ligand described herein
cagatgctgagattcgccca

SEQ ID NO: 1276 - RNA, 20 nt, synthetic construct
  source 1..20: mol_type = other RNA
  misc_difference 20: note = Nucleotide conjugated to any number of any targeting ligand described herein
gcaccaactgagcaaaggca

SEQ ID NO: 1277 - RNA, 20 nt, synthetic construct
  source 1..20: mol_type = other RNA
  misc_difference 20: note = Nucleotide conjugated to any number of any targeting ligand described herein
atgacaccacaccagcataa

SEQ ID NO: 1278 - RNA, 20 nt, synthetic construct
  source 1..20: mol_type = other RNA
  misc_difference 20: note = Nucleotide conjugated to any number of any targeting ligand described herein
aagaagcaccaactgaaaaa

SEQ ID NO: 1279 - RNA, 20 nt, synthetic construct
  source 1..20: mol_type = other RNA
  misc_difference 20: note = Nucleotide conjugated to any number of any targeting ligand described herein
gttccaagcctagaggctca

SEQ ID NO: 1280 - RNA, 20 nt, synthetic construct
  source 1..20: mol_type = other RNA
  misc_difference 20: note = Nucleotide conjugated to any number of any targeting ligand described herein
aacctgacgcgatgctcaga

SEQ ID NO: 1281 - RNA, 20 nt, synthetic construct
  source 1..20: mol_type = other RNA
  misc_difference 20: note = Nucleotide conjugated to any number of any targeting ligand described herein
acttgccaagcttggtcata

SEQ ID NO: 1282 - RNA, 20 nt, synthetic construct
  source 1..20: mol_type = other RNA
  misc_difference 20: note = Nucleotide conjugated to any number of any targeting ligand described herein
acactggcatcagaggacaa

SEQ ID NO: 1283 - RNA, 20 nt, synthetic construct
  source 1..20: mol_type = other RNA
  misc_difference 20: note = Nucleotide conjugated to any number of any targeting ligand described herein
tgctggcctgaccaggaaca

SEQ ID NO: 1284 - RNA, 20 nt, synthetic construct
  source 1..20: mol_type = other RNA
  misc_difference 20: note = Nucleotide conjugated to any number of any targeting ligand described herein
gttataccatggatcccaga

SEQ ID NO: 1285 - RNA, 20 nt, synthetic construct
  source 1..20: mol_type = other RNA
  misc_difference 20: note = Nucleotide conjugated to any number of any targeting ligand described herein
caactgagcaaaggcctgga

SEQ ID NO: 1286 - RNA, 20 nt, synthetic construct
  source 1..20: mol_type = other RNA
  misc_difference 20: note = Nucleotide conjugated to any number of any targeting ligand described herein
caggtgggagtactgcaaca

SEQ ID NO: 1287 - RNA, 20 nt, synthetic construct
  source 1..20: mol_type = other RNA
  misc_difference 20: note = Nucleotide conjugated to any number of any targeting ligand described herein
ttatcgaggcacattctcca

SEQ ID NO: 1288 - RNA, 20 nt, synthetic construct
  source 1..20: mol_type = other RNA
  misc_difference 20: note = Nucleotide conjugated to any number of any targeting ligand described herein
gcaaagccccggggtccaga

SEQ ID NO: 1289 - RNA, 20 nt, synthetic construct
  source 1..20: mol_type = other RNA
  misc_difference 20: note = Nucleotide conjugated to any number of any targeting ligand described herein
acctgagcaaagccatgtga

SEQ ID NO: 1290 - RNA, 20 nt, synthetic construct
  source 1..20: mol_type = other RNA
  misc_difference 20: note = Nucleotide conjugated to any number of any targeting ligand described herein
acacgatgctcagatgcaga

SEQ ID NO: 1291 - RNA, 20 nt, synthetic construct
  source 1..20: mol_type = other RNA
  misc_difference 20: note = Nucleotide conjugated to any number of any targeting ligand described herein
gacatgtcaatcttggtcaa

SEQ ID NO: 1292 - RNA, 20 nt, synthetic construct
  source 1..20: mol_type = other RNA
  misc_difference 20: note = Nucleotide conjugated to any number of any targeting ligand described herein
cagatcctgtggcagcccca

SEQ ID NO: 1293 - RNA, 20 nt, synthetic construct
  source 1..20: mol_type = other RNA
  misc_difference 20: note = Nucleotide conjugated to any number of any targeting ligand described herein
tcctcacaactcccacggta

SEQ ID NO: 1294 - RNA, 20 nt, synthetic construct
  source 1..20: mol_type = other RNA
  misc_difference 20: note = Nucleotide conjugated to any number of any targeting ligand described herein
agcctagaggctccttctga

SEQ ID NO: 1295 - RNA, 20 nt, synthetic construct
  source 1..20: mol_type = other RNA
  misc_difference 20: note = Nucleotide conjugated to any number of any targeting ligand described herein
acaatgaactactgcaggaa

SEQ ID NO: 1296 - RNA, 20 nt, synthetic construct
  source 1..20: mol_type = other RNA
  misc_difference 20: note = Nucleotide conjugated to any number of any targeting ligand described herein
gtgacagaatcaagtgtcca

SEQ ID NO: 1297 - RNA, 20 nt, synthetic construct
  source 1..20: mol_type = other RNA
  misc_difference 20: note = Nucleotide conjugated to any number of any targeting ligand described herein
cactgtcacaggaaggacca

SEQ ID NO: 1298 - RNA, 20 nt, synthetic construct
  source 1..20: mol_type = other RNA
  misc_difference 20: note = Nucleotide conjugated to any number of any targeting ligand described herein
tcttggtcctctatgacaca

SEQ ID NO: 1299 - RNA, 20 nt, synthetic construct
  source 1..20: mol_type = other RNA
  misc_difference 20: note = Nucleotide conjugated to any number of any targeting ligand described herein
aatgctcagacgcagaagga

SEQ ID NO: 1300 - RNA, 20 nt, synthetic construct
  source 1..20: mol_type = other RNA
  misc_difference 20: note = Nucleotide conjugated to any number of any targeting ligand described herein
tgaactactgcaggaatcca

SEQ ID NO: 1301 - RNA, 20 nt, synthetic construct
  source 1..20: mol_type = other RNA
  misc_difference 20: note = Nucleotide conjugated to any number of any targeting ligand described herein
gtggtccaggattgctacca

SEQ ID NO: 1302 - RNA, 20 nt, synthetic construct
  source 1..20: mol_type = other RNA
  misc_difference 20: note = Nucleotide conjugated to any number of any targeting ligand described herein
gggtgcaggagtgctaccaa

SEQ ID NO: 1303 - RNA, 20 nt, synthetic construct
  source 1..20: mol_type = other RNA
  misc_difference 20: note = Nucleotide conjugated to any number of any targeting ligand described herein
atctatgacaccacaccaga

SEQ ID NO: 1304 - RNA, 20 nt, synthetic construct
  source 1..20: mol_type = other RNA
  misc_difference 20: note = Nucleotide conjugated to any number of any targeting ligand described herein
aatcaggtgtcctagagaca

SEQ ID NO: 1305 - RNA, 20 nt, synthetic construct
  source 1..20: mol_type = other RNA
  misc_difference 20: note = Nucleotide conjugated to any number of any targeting ligand described herein
tccaggattgctaccatgga

SEQ ID NO: 1306 - RNA, 20 nt, synthetic construct
  source 1..20: mol_type = other RNA
  misc_difference 20: note = Nucleotide conjugated to any number of any targeting ligand described herein
tgagcaaagccatgtggtca

SEQ ID NO: 1307 - RNA, 20 nt, synthetic construct
  source 1..20: mol_type = other RNA
  misc_difference 20: note = Nucleotide conjugated to any number of any targeting ligand described herein
ctactgccgaaatccagata

SEQ ID NO: 1308 - RNA, 20 nt, synthetic construct
  source 1..20: mol_type = other RNA
  misc_difference 20: note = Nucleotide conjugated to any number of any targeting ligand described herein
tgagcaaaggcctggggtga

SEQ ID NO: 1309 - RNA, 20 nt, synthetic construct
  source 1..20: mol_type = other RNA
  misc_difference 20: note = Nucleotide conjugated to any number of any targeting ligand described herein
agcaaaggcctggggtgcaa

SEQ ID NO: 1310 - RNA, 20 nt, synthetic construct
  source 1..20: mol_type = other RNA
  misc_difference 20: note = Nucleotide conjugated to any number of any targeting ligand described herein
tgtcaatcttggtcatccaa

SEQ ID NO: 1311 - RNA, 20 nt, synthetic construct
  source 1..20: mol_type = other RNA
  misc_difference 20: note = Nucleotide conjugated to any number of any targeting ligand described herein
aagcaccaactgaaaacaga

SEQ ID NO: 1312 - RNA, 20 nt, synthetic construct
  source 1..20: mol_type = other RNA
  misc_difference 20: note = Nucleotide conjugated to any number of any targeting ligand described herein
ggaaacccccggggtacaga

SEQ ID NO: 1313 - RNA, 20 nt, synthetic construct
  source 1..20: mol_type = other RNA
  misc_difference 20: note = Nucleotide conjugated to any number of any targeting ligand described herein
ggaccccagaaaactaccca

SEQ ID NO: 1314 - RNA, 20 nt, synthetic construct
  source 1..20: mol_type = other RNA
  misc_difference 20: note = Nucleotide conjugated to any number of any targeting ligand described herein
tcatccatgacaccacacca

SEQ ID NO: 1315 - RNA, 20 nt, synthetic construct
  source 1..20: mol_type = other RNA
  misc_difference 20: note = Nucleotide conjugated to any number of any targeting ligand described herein
aggaaacccccggggtacaa

SEQ ID NO: 1316 - RNA, 20 nt, synthetic construct
  source 1..20: mol_type = other RNA
  misc_difference 20: note = Nucleotide conjugated to any number of any targeting ligand described herein
tgctgagattcgcccttgga

SEQ ID NO: 1317 - RNA, 20 nt, synthetic construct
  source 1..20: mol_type = other RNA
  misc_difference 20: note = Nucleotide conjugated to any number of any targeting ligand described herein
ggtcatctatgacaccacaa

SEQ ID NO: 1318 - RNA, 20 nt, synthetic construct
  source 1..20: mol_type = other RNA
  misc_difference 20: note = Nucleotide conjugated to any number of any targeting ligand described herein
gttataccatggatcccaaa

SEQ ID NO: 1319 - RNA, 20 nt, synthetic construct
  source 1..20: mol_type = other RNA
  misc_difference 20: note = Nucleotide conjugated to any number of any targeting ligand described herein
accgactgagcaaaggccta

SEQ ID NO: 1320 - RNA, 20 nt, synthetic construct
  source 1..20: mol_type = other RNA
  misc_difference 20: note = Nucleotide conjugated to any number of any targeting ligand described herein
actgcaggaatccagatcca

SEQ ID NO: 1321 - RNA, 20 nt, synthetic construct
  source 1..20: mol_type = other RNA
  misc_difference 20: note = Nucleotide conjugated to any number of any targeting ligand described herein
gttacaccatggatcccaga

SEQ ID NO: 1322 - RNA, 20 nt, synthetic construct
  source 1..20: mol_type = other RNA
  misc_difference 20: note = Nucleotide conjugated to any number of any targeting ligand described herein
ccttctgaagaagcaccaaa

SEQ ID NO: 1323 - RNA, 20 nt, synthetic construct
  source 1..20: mol_type = other RNA
  misc_difference 20: note = Nucleotide conjugated to any number of any targeting ligand described herein
ctactaccattatggacaga

SEQ ID NO: 1324 - RNA, 20 nt, synthetic construct
  source 1..20: mol_type = other RNA
  misc_difference 20: note = Nucleotide conjugated to any number of any targeting ligand described herein
ccaagcttggtcatctatga

SEQ ID NO: 1325 - RNA, 20 nt, synthetic construct
  source 1..20: mol_type = other RNA
  misc_difference 20: note = Nucleotide conjugated to any number of any targeting ligand described herein
gtgttttaccatggacccca

SEQ ID NO: 1326 - RNA, 20 nt, synthetic construct
  source 1..20: mol_type = other RNA
  misc_difference 20: note = Nucleotide conjugated to any number of any targeting ligand described herein
aaggcctggggtgcaggaga

SEQ ID NO: 1327 - RNA, 20 nt, synthetic construct
  source 1..20: mol_type = other RNA
  misc_difference 20: note = Nucleotide conjugated to any number of any targeting ligand described herein
ggtggtcccagttccaagca

SEQ ID NO: 1328 - RNA, 20 nt, synthetic construct
  source 1..20: mol_type = other RNA
  misc_difference 20: note = Nucleotide conjugated to any number of any targeting ligand described herein
cctggggtgcaggagtgcta

SEQ ID NO: 1329 - RNA, 20 nt, synthetic construct
  source 1..20: mol_type = other RNA
  misc_difference 20: note = Nucleotide conjugated to any number of any targeting ligand described herein
cagaggaccccagaaaacta

SEQ ID NO: 1330 - RNA, 20 nt, synthetic construct
  source 1..20: mol_type = other RNA
  misc_difference 20: note = Nucleotide conjugated to any number of any targeting ligand described herein
tgctcagacacagaagggaa

SEQ ID NO: 1331 - RNA, 20 nt, synthetic construct
  source 1..20: mol_type = other RNA
  misc_difference 20: note = Nucleotide conjugated to any number of any targeting ligand described herein
cccttggtgttacaccatga

SEQ ID NO: 1332 - RNA, 20 nt, synthetic construct
  source 1..20: mol_type = other RNA
  misc_difference 20: note = Nucleotide conjugated to any number of any targeting ligand described herein
ttcgcccttggtgttacaca

SEQ ID NO: 1333 - RNA, 20 nt, synthetic construct
  source 1..20: mol_type = other RNA
  misc_difference 20: note = Nucleotide conjugated to any number of any targeting ligand described herein
gagcaaagccatgtggtcca

SEQ ID NO: 1334 - RNA, 20 nt, synthetic construct
  source 1..20: mol_type = other RNA
  misc_difference 20: note = Nucleotide conjugated to any number of any targeting ligand described herein
ccactgtcacaggaaggaca

SEQ ID NO: 1335 - RNA, 20 nt, synthetic construct
  source 1..20: mol_type = other RNA
  misc_difference 20: note = Nucleotide conjugated to any number of any targeting ligand described herein
tggtggcctgaccaggaaca

SEQ ID NO: 1336 - RNA, 20 nt, synthetic construct
  source 1..20: mol_type = other RNA
  misc_difference 20: note = Nucleotide conjugated to any number of any targeting ligand described herein
gccaagcttggtcatctata

SEQ ID NO: 1337 - RNA, 20 nt, synthetic construct
  source 1..20: mol_type = other RNA
  misc_difference 20: note = Nucleotide conjugated to any number of any targeting ligand described herein
gtgcaggagtgctaccacga

SEQ ID NO: 1338 - RNA, 20 nt, synthetic construct
  source 1..20: mol_type = other RNA
  misc_difference 20: note = Nucleotide conjugated to any number of any targeting ligand described herein
cctagaggctccttccgaaa

SEQ ID NO: 1339 - RNA, 20 nt, synthetic construct
  source 1..20: mol_type = other RNA
  misc_difference 20: note = Nucleotide conjugated to any number of any targeting ligand described herein
acctgagaaaagccctgtga

SEQ ID NO: 1340 - RNA, 20 nt, synthetic construct
  source 1..20: mol_type = other RNA
  misc_difference 20: note = Nucleotide conjugated to any number of any targeting ligand described herein
gcagccccttggtgttataa

SEQ ID NO: 1341 - RNA, 20 nt, synthetic construct
  source 1..20: mol_type = other RNA
  misc_difference 20: note = Nucleotide conjugated to any number of any targeting ligand described herein
cccagaaaactacccaaata

SEQ ID NO: 1342 - RNA, 20 nt, synthetic construct
  source 1..20: mol_type = other RNA
  misc_difference 20: note = Nucleotide conjugated to any number of any targeting ligand described herein
ctccttccgaacaagcacca

SEQ ID NO: 1343 - RNA, 20 nt, synthetic construct
  source 1..20: mol_type = other RNA
  misc_difference 20: note = Nucleotide conjugated to any number of any targeting ligand described herein
agaatcaggtgtcctagaga

SEQ ID NO: 1344 - RNA, 20 nt, synthetic construct
  source 1..20: mol_type = other RNA
  misc_difference 20: note = Nucleotide conjugated to any number of any targeting ligand described herein
aaactacccaaatgctggca

SEQ ID NO: 1345 - RNA, 20 nt, synthetic construct
  source 1..20: mol_type = other RNA
  misc_difference 20: note = Nucleotide conjugated to any number of any targeting ligand described herein
ctactgcaggaatccagata

SEQ ID NO: 1346 - RNA, 20 nt, synthetic construct
  source 1..20: mol_type = other RNA
  misc_difference 20: note = Nucleotide conjugated to any number of any targeting ligand described herein
caagcctagaggctccttca

SEQ ID NO: 1347 - RNA, 20 nt, synthetic construct
  source 1..20: mol_type = other RNA
  misc_difference 20: note = Nucleotide conjugated to any number of any targeting ligand described herein
gaaggacatgtcaatcttga

SEQ ID NO: 1348 - RNA, 20 nt, synthetic construct
  source 1..20: mol_type = other RNA
  misc_difference 20: note = Nucleotide conjugated to any number of any targeting ligand described herein
tccaccactgtcacaggaaa

SEQ ID NO: 1349 - RNA, 20 nt, synthetic construct
  source 1..20: mol_type = other RNA
  misc_difference 20: note = Nucleotide conjugated to any number of any targeting ligand described herein
aatcttggtcatccatgaca

SEQ ID NO: 1350 - RNA, 20 nt, synthetic construct
  source 1..20: mol_type = other RNA
  misc_difference 20: note = Nucleotide conjugated to any number of any targeting ligand described herein
aaatgtcctggaagcattga

SEQ ID NO: 1351 - RNA, 20 nt, synthetic construct
  source 1..20: mol_type = other RNA
  misc_difference 20: note = Nucleotide conjugated to any number of any targeting ligand described herein
acaccagcatagtcggacca

SEQ ID NO: 1352 - RNA, 20 nt, synthetic construct
  source 1..20: mol_type = other RNA
  misc_difference 20: note = Nucleotide conjugated to any number of any targeting ligand described herein
tgtcctggaagcattgtaga

SEQ ID NO: 1353 - RNA, 20 nt, synthetic construct
  source 1..20: mol_type = other RNA
  misc_difference 20: note = Nucleotide conjugated to any number of any targeting ligand described herein
atgacaccacactggcatca

SEQ ID NO: 1354 - RNA, 20 nt, synthetic construct
  source 1..20: mol_type = other RNA
  misc_difference 20: note = Nucleotide conjugated to any number of any targeting ligand described herein
cttggtgttttaccatggaa

SEQ ID NO: 1355 - RNA, 20 nt, synthetic construct
  source 1..20: mol_type = other RNA
  misc_difference 20: note = Nucleotide conjugated to any number of any targeting ligand described herein
acgatgctcagatgcagaaa

SEQ ID NO: 1356 - RNA, 20 nt, synthetic construct
  source 1..20: mol_type = other RNA
  misc_difference 20: note = Nucleotide conjugated to any number of any targeting ligand described herein
aagccatgtggtccaggata

SEQ ID NO: 1357 - RNA, 20 nt, synthetic construct
  source 1..20: mol_type = other RNA
  misc_difference 20: note = Nucleotide conjugated to any number of any targeting ligand described herein
agtactgcaacctgacgcga

SEQ ID NO: 1358 - RNA, 20 nt, synthetic construct
  source 1..20: mol_type = other RNA
  misc_difference 20: note = Nucleotide conjugated to any number of any targeting ligand described herein
aactactgcaggaatccaga

SEQ ID NO: 1359 - RNA, 20 nt, synthetic construct
  source 1..20: mol_type = other RNA
  misc_difference 20: note = Nucleotide conjugated to any number of any targeting ligand described herein
ctgcaacctgacgcgatgca

SEQ ID NO: 1360 - RNA, 20 nt, synthetic construct
  source 1..20: mol_type = other RNA
  misc_difference 20: note = Nucleotide conjugated to any number of any targeting ligand described herein
gcatcagaggaccccagaaa

SEQ ID NO: 1361 - RNA, 20 nt, synthetic construct
  source 1..20: mol_type = other RNA
  misc_difference 20: note = Nucleotide conjugated to any number of any targeting ligand described herein
agaaacagaatcaggtgtca

SEQ ID NO: 1362 - RNA, 20 nt, synthetic construct
  source 1..20: mol_type = other RNA
  misc_difference 20: note = Nucleotide conjugated to any number of any targeting ligand described herein
cagacacagaagggactgta

SEQ ID NO: 1363 - RNA, 20 nt, synthetic construct
  source 1..20: mol_type = other RNA
  misc_difference 20: note = Nucleotide conjugated to any number of any targeting ligand described herein
tagaggctccttctgaacaa

SEQ ID NO: 1364 - RNA, 20 nt, synthetic construct
  source 1..20: mol_type = other RNA
  misc_difference 20: note = Nucleotide conjugated to any number of any targeting ligand described herein
ggcctggggtgcaggagtga

SEQ ID NO: 1365 - RNA, 20 nt, synthetic construct
  source 1..20: mol_type = other RNA
  misc_difference 20: note = Nucleotide conjugated to any number of any targeting ligand described herein
gtcaatcttggtcatctata

SEQ ID NO: 1366 - RNA, 20 nt, synthetic construct
  source 1..20: mol_type = other RNA
  misc_difference 20: note = Nucleotide conjugated to any number of any targeting ligand described herein
attctccaccactgtcacaa

SEQ ID NO: 1367 - RNA, 20 nt, synthetic construct
  source 1..20: mol_type = other RNA
  misc_difference 20: note = Nucleotide conjugated to any number of any targeting ligand described herein
ggagtactgcaacctgacaa

SEQ ID NO: 1368 - RNA, 20 nt, synthetic construct
  source 1..20: mol_type = other RNA
  misc_difference 20: note = Nucleotide conjugated to any number of any targeting ligand described herein
aatgtccagtgacagaatca

SEQ ID NO: 1369 - RNA, 20 nt, synthetic construct
  source 1..20: mol_type = other RNA
  misc_difference 20: note = Nucleotide conjugated to any number of any targeting ligand described herein
aaagccatgtggtccaggaa

SEQ ID NO: 1370 - RNA, 20 nt, synthetic construct
  source 1..20: mol_type = other RNA
  misc_difference 20: note = Nucleotide conjugated to any number of any targeting ligand described herein
cagatattgccttgctaaaa

SEQ ID NO: 1371 - RNA, 20 nt, synthetic construct
  source 1..20: mol_type = other RNA
  misc_difference 20: note = Nucleotide conjugated to any number of any targeting ligand described herein
caaaggcctggggtgcagga

SEQ ID NO: 1372 - RNA, 20 nt, synthetic construct
  source 1..20: mol_type = other RNA
  misc_difference 20: note = Nucleotide conjugated to any number of any targeting ligand described herein
cacagaagggactgtggtca

SEQ ID NO: 1373 - RNA, 20 nt, synthetic construct
  source 1..20: mol_type = other RNA
  misc_difference 20: note = Nucleotide conjugated to any number of any targeting ligand described herein
gcgatgctcagacacagaaa

SEQ ID NO: 1374 - RNA, 20 nt, synthetic construct
  source 1..20: mol_type = other RNA
  misc_difference 20: note = Nucleotide conjugated to any number of any targeting ligand described herein
tgggagtactgcaacctgaa

SEQ ID NO: 1375 - RNA, 20 nt, synthetic construct
  source 1..20: mol_type = other RNA
  misc_difference 20: note = Nucleotide conjugated to any number of any targeting ligand described herein
tgacgcgatgctcagacaca

SEQ ID NO: 1376 - RNA, 20 nt, synthetic construct
  source 1..20: mol_type = other RNA
  misc_difference 20: note = Nucleotide conjugated to any number of any targeting ligand described herein
ggcccttggtgttttaccaa

SEQ ID NO: 1377 - RNA, 22 nt, synthetic construct
  source 1..22: mol_type = other RNA
  modified_base 1: mod_base = OTHER; note = Mono methyl protected phosphate mimic uridine
ttcgataactctgtccatcacc

SEQ ID NO: 1378 - RNA, 22 nt, synthetic construct
  source 1..22: mol_type = other RNA
  modified_base 1: mod_base = OTHER; note = Mono methyl protected phosphate mimic 2'-O-methyl-uridine with phosphorothioate linkage
  modified_base 2: mod_base = OTHER; note = 2'-fluoro-uridine with phosphorothioate linkage
  modified_base 3: mod_base = OTHER; note = 2'-fluoro-cytidine
  modified_base 4: mod_base = OTHER; note = 2'-O-methyl-guanosine
  modified_base 5: mod_base = OTHER; note = 2'-fluoro-adenosine
  modified_base 6: mod_base = OTHER; note = 2'-O-methyl-uridine
  modified_base 7: mod_base = OTHER; note = 2'-fluoro-adenosine
  modified_base 8: mod_base = OTHER; note = 2'-O-methyl-adenosine
  modified_base 9: mod_base = OTHER; note = 2'-O-methyl-cytidine
  modified_base 10: mod_base = OTHER; note = 2'-fluoro-uridine
  modified_base 11: mod_base = OTHER; note = 2'-O-methyl-cytidine
  modified_base 12: mod_base = OTHER; note = 2'-O-methyl-uridine
  modified_base 13: mod_base = OTHER; note = 2'-O-methyl-guanosine
  modified_base 14: mod_base = OTHER; note = 2'-fluoro-uridine
  modified_base 15: mod_base = OTHER; note = 2'-O-methyl-cytidine
  modified_base 16: mod_base = OTHER; note = 2'-fluoro-cytidine
  modified_base 17: mod_base = OTHER; note = 2'-O-methyl-adenosine
  modified_base 18: mod_base = OTHER; note = 2'-O-methyl-uridine
  modified_base 19: mod_base = OTHER; note = 2'-O-methyl-cytidine
  modified_base 20: mod_base = OTHER; note = 2'-O-methyl-adenosine with phosphorothioate linkage
  modified_base 21: mod_base = OTHER; note = 2'-O-methyl-cytidine with phosphorothioate linkage
  modified_base 22: mod_base = OTHER; note = 2'-O-methyl-cytidine
ttcgataactctgtccatcacc

SEQ ID NO: 1379 - RNA, 20 nt, synthetic construct
  source 1..20: mol_type = other RNA
  modified_base 20: mod_base = OTHER; note = Nucleotide conjugated to 3 iterations of (2R,3R,4R,5S)-5-(3-(5-(((2R,3R,4R,5R,6R)- 3-acetamido-4,5-dihydroxy-6-(hydroxymethyl)tetrahydro-2H-py ran-2-yl)oxy) pentanamido)propyl)-2-((hydroxyl)methyl)-4-methoxytetrahydr ofuran-3-oxyl
tgatggacagagttatcgaa

SEQ ID NO: 1380 - RNA, 20 nt, synthetic construct
  source 1..20: mol_type = other RNA
  modified_base 20: mod_base = OTHER; note = Nucleotide conjugated to 3 iterations of (2R,3R,4R,5S)-5-(3-(5-(((2R,3R,4R,5R,6R)- 3-acetamido-4,5-dihydroxy-6-(hydroxymethyl)tetrahydro-2H-py ran-2-yl)oxy) pentanamido)propyl)-2-((hydroxyl)methyl)-4-methoxytetrahydr ofuran-3-oxyl
cttgccaagcttggtcatca

SEQ ID NO: 1381-1382 - skipped (2 entries)

SEQ ID NO: 1383 - RNA, 22 nt, synthetic construct
  source 1..22: mol_type = other RNA
  modified_base 1: mod_base = OTHER; note = Mono methyl protected phosphate mimic uridine
tgatgaccaagcttggcaagtt

SEQ ID NO: 1384 - RNA, 22 nt, synthetic construct
  source 1..22: mol_type = other RNA
  modified_base 1: mod_base = OTHER; note = Mono methyl protected phosphate mimic 2'-O-methyl-uridine with phosphorothioate linkage
  modified_base 2: mod_base = OTHER; note = 2'-fluoro-guanosine with phosphorothioate linkage
  modified_base 3: mod_base = OTHER; note = 2'-fluoro-adenosine
  modified_base 4: mod_base = OTHER; note = 2'-O-methyl-uridine
  modified_base 5: mod_base = OTHER; note = 2'-fluoro-guanosine
  modified_base 6: mod_base = OTHER; note = 2'-O-methyl-adenosine
  modified_base 7: mod_base = OTHER; note = 2'-fluoro-cytidine
  modified_base 8: mod_base = OTHER; note = 2'-O-methyl-cytidine
  modified_base 9: mod_base = OTHER; note = 2'-O-methyl-adenosine
  modified_base 10: mod_base = OTHER; note = 2'-fluoro-adenosine
  modified_base 11: mod_base = OTHER; note = 2'-O-methyl-guanosine
  modified_base 12: mod_base = OTHER; note = 2'-O-methyl-cytidine
  modified_base 13: mod_base = OTHER; note = 2'-O-methyl-uridine
  modified_base 14: mod_base = OTHER; note = 2'-fluoro-uridine
  modified_base 15: mod_base = OTHER; note = 2'-O-methyl-guanosine
  modified_base 16: mod_base = OTHER; note = 2'-fluoro-guanosine
  modified_base 17: mod_base = OTHER; note = 2'-O-methyl-cytidine
  modified_base 18: mod_base = OTHER; note = 2'-O-methyl-adenosine
  modified_base 19: mod_base = OTHER; note = 2'-O-methyl-adenosine
  modified_base 20: mod_base = OTHER; note = 2'-O-methyl-guanosine with phosphorothioate linkage
  modified_base 21: mod_base = OTHER; note = 2'-O-methyl-uridine with phosphorothioate linkage
  modified_base 22: mod_base = OTHER; note = 2'-O-methyl-uridine
tgatgaccaagcttggcaagtt

SEQ ID NO: 1385 - RNA, 20 nt, synthetic construct
  source 1..20: mol_type = other RNA
  modified_base 20: mod_base = OTHER; note = Nucleotide conjugated to 3 iterations of (2R,3R,4R,5S)-5-(3-(5-(((2R,3R,4R,5R,6R)- 3-acetamido-4,5-dihydroxy-6-(hydroxymethyl)tetrahydro-2H-py ran-2-yl)oxy) pentanamido)propyl)-2-((hydroxyl)methyl)-4-methoxytetrahydr ofuran-3-oxyl
aggaaggacatgtcagtcta

SEQ ID NO: 1386 - RNA, 22 nt, synthetic construct
  source 1..22: mol_type = other RNA
  modified_base 1: mod_base = OTHER; note = Mono methyl protected phosphate mimic uridine
tagactgacatgtccttcctgt

SEQ ID NO: 1387 - RNA, 22 nt, synthetic construct
  source 1..22: mol_type = other RNA
  modified_base 1: mod_base = OTHER; note = Mono methyl protected phosphate mimic 2'-O-methyl-uridine with phosphorothioate linkage
  modified_base 2: mod_base = OTHER; note = 2'-fluoro-adenosine with phosphorothioate linkage
  modified_base 3: mod_base = OTHER; note = 2'-fluoro-guanosine
  modified_base 4: mod_base = OTHER; note = 2'-O-methyl-adenosine
  modified_base 5: mod_base = OTHER; note = 2'-fluoro-cytidine
  modified_base 6: mod_base = OTHER; note = 2'-O-methyl-uridine
  modified_base 7: mod_base = OTHER; note = 2'-fluoro-guanosine
  modified_base 8: mod_base = OTHER; note = 2'-O-methyl-adenosine
  modified_base 9: mod_base = OTHER; note = 2'-O-methyl-cytidine
  modified_base 10: mod_base = OTHER; note = 2'-fluoro-adenosine
  modified_base 11: mod_base = OTHER; note = 2'-O-methyl-uridine
  modified_base 12: mod_base = OTHER; note = 2'-O-methyl-guanosine
  modified_base 13: mod_base = OTHER; note = 2'-O-methyl-uridine
  modified_base 14: mod_base = OTHER; note = 2'-fluoro-cytidine
  modified_base 15: mod_base = OTHER; note = 2'-O-methyl-cytidine
  modified_base 16: mod_base = OTHER; note = 2'-fluoro-uridine
  modified_base 17: mod_base = OTHER; note = 2'-O-methyl-uridine
  modified_base 18: mod_base = OTHER; note = 2'-O-methyl-cytidine
  modified_base 19: mod_base = OTHER; note = 2'-O-methyl-cytidine
  modified_base 20: mod_base = OTHER; note = 2'-O-methyl-uridine with phosphorothioate linkage
  modified_base 21: mod_base = OTHER; note = 2'-O-methyl-guanosine with phosphorothioate linkage
  modified_base 22: mod_base = OTHER; note = 2'-O-methyl-uridine
tagactgacatgtccttcctgt

SEQ ID NO: 1388 - RNA, 20 nt, synthetic construct
  source 1..20: mol_type = other RNA
  modified_base 20: mod_base = OTHER; note = Nucleotide conjugated to 3 iterations of (2R,3R,4R,5S)-5-(3-(5-(((2R,3R,4R,5R,6R)- 3-acetamido-4,5-dihydroxy-6-(hydroxymethyl)tetrahydro-2H-py ran-2-yl)oxy) pentanamido)propyl)-2-((hydroxyl)methyl)-4-methoxytetrahydr ofuran-3-oxyl
agagttatcgaggcacatta

SEQ ID NO: 1389 - RNA, 21 nt, synthetic construct
  source 1..21: mol_type = other RNA
tcgtataacaataaggggctg

SEQ ID NO: 1390 - RNA, 21 nt, synthetic construct
  source 1..21: mol_type = other RNA
  modified_base 1: mod_base = OTHER; note = 2'-O-methyl-uridine with phosphorothioate linkage
  modified_base 2: mod_base = OTHER; note = 2'-fluoro-cytidine with phosphorothioate linkage
  modified_base 3: mod_base = OTHER; note = 2'-O-methyl-guanosine
  modified_base 4: mod_base = OTHER; note = 2'-fluoro-uridine
  modified_base 5: mod_base = OTHER; note = 2'-O-methyl-adenosine
  modified_base 6: mod_base = OTHER; note = 2'-fluoro-uridine
  modified_base 7: mod_base = OTHER; note = 2'-O-methyl-adenosine
  modified_base 8: mod_base = OTHER; note = 2'-O-methyl-adenosine
  modified_base 9: mod_base = OTHER; note = 2'-O-methyl-cytidine
  modified_base 10: mod_base = OTHER; note = 2'-O-methyl-adenosine
  modified_base 11: mod_base = OTHER; note = 2'-O-methyl-adenosine
  modified_base 12: mod_base = OTHER; note = 2'-fluoro-uridine
  modified_base 13: mod_base = OTHER; note = 2'-O-methyl-adenosine
  modified_base 14: mod_base = OTHER; note = 2'-fluoro-adenosine
  modified_base 15: mod_base = OTHER; note = 2'-O-methyl-guanosine
  modified_base 16: mod_base = OTHER; note = 2'-fluoro-guanosine
  modified_base 17: mod_base = OTHER; note = 2'-O-methyl-guanosine
  modified_base 18: mod_base = OTHER; note = 2'-fluoro-guanosine
  modified_base 19: mod_base = OTHER; note = 2'-O-methyl-cytidine with phosphorothioate linkage
  modified_base 20: mod_base = OTHER; note = 2'-fluoro-uridine with phosphorothioate linkage
  modified_base 21: mod_base = OTHER; note = 2'-O-methyl-guanosine
tcgtataacaataaggggctg

SEQ ID NO: 1391 - RNA, 20 nt, synthetic construct
  source 1..20: mol_type = other RNA
  modified_base 1: mod_base = OTHER; note = Nucleotide conjugated to triantennary GalNAc (N-acetyl-galactosamine)
  misc_feature 20: note = Nucleotide connected to deoxyadenosine via a 3'-3' phosphodiester bond
cagccccttattgttatacg

SEQ ID NO: 1392 - RNA, 20 nt, synthetic construct
  source 1..20: mol_type = other RNA
  modified_base 1: mod_base = OTHER; note = 2'-O-methyl-cytidine with phosphorothioate linkage conjugated to triantennary GalNAc (N-acetyl-galactosamine) via a phosphorothioate linkage
  modified_base 2: mod_base = OTHER; note = 2'-O-methyl-adenosine
  modified_base 3: mod_base = OTHER; note = 2'-O-methyl-guanosine
  modified_base 4: mod_base = OTHER; note = 2'-O-methyl-cytidine
  modified_base 5: mod_base = OTHER; note = 2'-O-methyl-cytidine
  modified_base 6: mod_base = OTHER; note = 2'-O-methyl-cytidine
  modified_base 7: mod_base = OTHER; note = 2'-O-methyl-cytidine
  modified_base 8: mod_base = OTHER; note = 2'-O-methyl-uridine
  modified_base 9: mod_base = OTHER; note = 2'-fluoro-uridine
  modified_base 10: mod_base = OTHER; note = 2'-fluoro-adenosine
  modified_base 11: mod_base = OTHER; note = 2'-fluoro-uridine
  modified_base 12: mod_base = OTHER; note = 2'-O-methyl-uridine
  modified_base 13: mod_base = OTHER; note = 2'-O-methyl-guanosine
  modified_base 14: mod_base = OTHER; note = 2'-O-methyl-uridine
  modified_base 15: mod_base = OTHER; note = 2'-O-methyl-uridine
  modified_base 16: mod_base = OTHER; note = 2'-O-methyl-adenosine
  modified_base 17: mod_base = OTHER; note = 2'-O-methyl-uridine
  modified_base 18: mod_base = OTHER; note = 2'-O-methyl-adenosine
  modified_base 19: mod_base = OTHER; note = 2'-O-methyl-cytidine
  modified_base 20: mod_base = OTHER; note = 2'-O-methyl-guanosine with phosphorothioate linkage
  misc_feature 20: note = Nucleotide connected to deoxyadenosine via a 3'-3' phosphorothioate linkage
cagccccttattgttatacg

SEQ ID NO: 1393-1394 - skipped (2 entries)

SEQ ID NO: 1395 - RNA, 22 nt, synthetic construct
  source 1..22: mol_type = other RNA
  modified_base 1: mod_base = OTHER; note = Mono methyl protected phosphate mimic uridine
taatgtgcctcgataactctgg

SEQ ID NO: 1396 - RNA, 22 nt, synthetic construct
  source 1..22: mol_type = other RNA
  modified_base 1: mod_base = OTHER; note = Mono methyl protected phosphate mimic 2'-O-methyl-uridine with phosphorothioate linkage
  modified_base 2: mod_base = OTHER; note = 2'-fluoro-adenosine with phosphorothioate linkage
  modified_base 3: mod_base = OTHER; note = 2'-fluoro-adenosine
  modified_base 4: mod_base = OTHER; note = 2'-O-methyl-uridine
  modified_base 5: mod_base = OTHER; note = 2'-fluoro-guanosine
  modified_base 6: mod_base = OTHER; note = 2'-O-methyl-uridine
  modified_base 7: mod_base = OTHER; note = 2'-fluoro-guanosine
  modified_base 8: mod_base = OTHER; note = 2'-O-methyl-cytidine
  modified_base 9: mod_base = OTHER; note = 2'-O-methyl-cytidine
  modified_base 10: mod_base = OTHER; note = 2'-fluoro-uridine
  modified_base 11: mod_base = OTHER; note = 2'-O-methyl-cytidine
  modified_base 12: mod_base = OTHER; note = 2'-O-methyl-guanosine
  modified_base 13: mod_base = OTHER; note = 2'-O-methyl-adenosine
  modified_base 14: mod_base = OTHER; note = 2'-fluoro-uridine
  modified_base 15: mod_base = OTHER; note = 2'-O-methyl-adenosine
  modified_base 16: mod_base = OTHER; note = 2'-fluoro-adenosine
  modified_base 17: mod_base = OTHER; note = 2'-O-methyl-cytidine
  modified_base 18: mod_base = OTHER; note = 2'-O-methyl-uridine
  modified_base 19: mod_base = OTHER; note = 2'-O-methyl-cytidine
  modified_base 20: mod_base = OTHER; note = 2'-O-methyl-uridine with phosphorothioate linkage
  modified_base 21: mod_base = OTHER; note = 2'-O-methyl-guanosine with phosphorothioate linkage
  modified_base 22: mod_base = OTHER; note = 2'-O-methyl-guanosine
taatgtgcctcgataactctgg